(19) United States
(12) Patent Application Publication
(10) Pub. No.: US 2024/0336921 A1
(43) Pub. Date: Oct. 10, 2024

(54) USE OF OLIGONUCLEOTIDES FOR INDIVIDUALS WITH RENAL IMPAIRMENT

(71) Applicant: Glaxo Smith Kline Intellectual Property (No. 3) Limited, Stevenage, (GB)

(72) Inventor: Ronald Cornelis Marie KALMEIJER, Titusville, NJ (US)

(21) Appl. No.: 18/577,450

(22) PCT Filed: Jul. 7, 2022
(86) PCT No.: PCT/IB2022/056278

§ 371 Date: Jan. 8, 2024

Related U.S. Application Data
(60) Provisional application No. 63/220,400, filed on Jul. 9, 2021.

(51) Int. Cl. C12N 15/113; A61K 31/675; A61K 31/708; A61K 45/06

(52) U.S. Cl. CPC C12N 15/1131; A61K 31/675; A61K 31/708; A61K 45/06; C12N 2310/11; C12N 2310/14; C12N 2310/351

(57) ABSTRACT

The present disclosure relates to methods for treatment of hepatitis B in a subject comprising an RNAi component, wherein the subject has a level of renal impairment.

### FIELD OF THE INVENTION

[0001] The present disclosure relates to methods for treatment of hepatitis B in a subject, wherein the subject has a level of renal impairment.

### BACKGROUND

[0002] Hepatitis B virus (HBV), a member of the Hepadnaviridae family, is a noncytopathic hepatic DNA virus that only infects the liver of human and great apes (e.g., chimpanzee, orangutan, bonobo, gorilla). The primary infection of adult humans with HBV causes an acute hepatitis with symptoms of organ inflammation, fever, jaundice and increased liver transaminases in blood. About 10-20% of adult patients are not able to overcome the virus infection and suffer a chronic disease progression over many years with increased risk of developing cirrhotic liver or liver cancer through the development of chronic hepatitis B virus (CHB) infection. Perinatal vertical transmission from mothers with CHB to newborns also leads to chronic hepatitis in about 80% of cases. All patients with CHB are at increased risk of progression to cirrhosis and hepatocellular carcinoma (HCC), depending on host and viral factors (Lampertico et al., J Hepatol., 2017, 67 (2):370-398).

[0003] Renally impaired patients are at higher risk of progression to end-stage disease in persons with chronic HBV infection. Renal diseases resulting from HBV infection are membranous (MN), membranoproliferative glomerulonephritis (MPGN), polyarteritis nodosa (PAN) and mesangial proliferative glomerulonephritis (MesPGN) (Kamimura et al., Diseases 2018, 6 (52):1-8). Renal impairment is particularly prevalent in HBV patients with liver cirrhosis. A condition referred to as hepatorenal syndrome (HRS) is characterized by renal dysfunction of HBV patients brought on by advanced liver cirrhosis in the HBV patient. Current treatments of CHB, such as nucleoside/nucleotide analogs (NAs), often exacerbate renal impairment in patients.

[0004] There exists a need for safely treating individuals who are affected by hepatitis B viral infection, including individuals with renal and/or hepatic impairment, and bringing functional cure (FC), whereby the patient (still) has undetectable serum HBsAg and HBV DNA at 6 months (or more) after the end of treatment. The FC essentially puts the CHB patient into a similar state as those who recover from acute HBV infection, a viral latency state maintained by HBV-specific T cells and has been shown to improve survival and health-related quality of life by preventing disease progression, including advanced decompensated cirrhosis and development of HCC.

### SUMMARY

[0005] Provided herein is a method of treating a Hepatitis B viral (HBV) infection in a subject, enhancing an immune response in a subject with a Hepatitis B viral (HBV) infection, decreasing viral replication in a subject with a Hepatitis B viral (HBV) infection, decreasing expression of one or more Hepatitis B Virus (HBV) polypeptide(s), more particularly of one or more polypeptide(s) from HBsAg and HBeAg, in a subject in need thereof, and/or increasing the targeted killing of hepatocytes comprising integrated viral DNA or extrachromosomal DNA in a subject with Hepatitis B viral (HBV) infection, wherein the method comprises administering to the subject an effective amount of a pharmaceutical composition comprising an RNAi component having:
[0006] (i) a first RNAi agent comprising: an antisense strand comprising a nucleotide sequence of any one of the following: SEQ ID NO:1, SEQ ID NO:2, SEQ ID NO:3, SEQ ID NO:4, SEQ ID NO:5, SEQ ID NO: 6, and SEQ ID NO:7 and a complementary sense strand. In some embodiments, the complementary sense strand comprises a nucleotide sequence of any one of the following: SEQ ID NO: 10, SEQ ID NO:11, SEQ ID NO: 12, SEQ ID NO:13, SEQ ID NO:14, and SEQ ID NO:15; and
[0007] (ii) a second RNAi agent comprising: an antisense strand comprising a nucleotide sequence of any one of the following: SEQ ID NO:8 and SEQ ID NO:9, and a complementary sense strand. In some embodiments, the complementary sense strand comprises a nucleotide sequence of any one of the following: SEQ ID NO:16, SEQ ID NO:17, SEQ ID NO:18, and SEQ ID NO:19.

[0008] In particular, the disclosure provides methods of treating a Hepatitis B viral (HBV) infection in a renally impaired subject, enhancing an immune response in a renally impaired subject with a Hepatitis B viral (HBV) infection, decreasing viral replication in a renally impaired subject with a Hepatitis B viral (HBV) infection, decreasing expression of one or more Hepatitis B Virus (HBV) polypeptide(s), more particularly of one or more polypeptide(s) from HBsAg and HBeAg, in a renally impaired subject in need thereof, and/or increasing the targeted killing of hepatocytes comprising integrated viral DNA or extrachromosomal DNA in a renally impaired subject with Hepatitis B viral (HBV) infection, comprising administering an RNAi component as set forth above. In some such embodiments, the renally impaired subject is also hepatically impaired.

[0009] In some embodiments, the disclosure provides methods of treating a Hepatitis B viral (HBV) infection in a subject with severe renal impairment or end-stage renal disease (ESRD), comprising administering an RNAi component as set forth above. In some such embodiments, the subject is also undergoing dialysis. In some embodiments the subject with severe renal impairment or ESRD is also hepatically impaired. In some embodiments, the subject has ESRD, is undergoing dialysis and is hepatically impaired. In other embodiments, the subject has ESRD, is not undergoing dialysis and is hepatically impaired.

[0010] In some embodiments where the subject is both renally and hepatically impaired, the subject has a Child-Pugh score of 7 to 9 (Class B), indicating significant functional hepatic compromise. In some embodiments, the subject has a Child-Pugh score of 10 to 15 (Class C), indicating decompensated disease. In some embodiments where the subject has a Child score of 7-9 or 10-15, the subject also suffers from renal impairment. In some embodiments, the renally and hepatically impaired subject has a globular filtration rate [GFR] of <90 mL/min. In other embodiments, the renally and hepatically impaired subject is on dialysis.

[0011] In some embodiments, the renally and hepatically subject may be suffering from compensated cirrhosis of the liver. In other embodiments, the renally and hepatically subject may be suffering from decompensated cirrhosis of the liver.

[0012] In certain embodiments, a method or use according to an embodiment of the application further comprises one or more additional agent for treating HBV, particularly CHB. The other agent can be, for example, a nucleoside/nucleotide analog (NA). In some embodiments, the nucleoside analog is entecavir, tenofovir disoproxil fumarate, tenofovir alafenamide, lamivudine, telbivudine, or a combination thereof. The other agent can also be, for example, a NAP, including, but are not limited to, REP2006, REP2031, REP2055, STOPS™ (S-antigen transport-inhibiting oligonucleotide polymers), and those disclosed in Patent Application Publication Nos. WO200424919: WO201221985; and WO202097342 and U.S. Pat. Nos. 7,358,068:8,008,269:8,008,270; and 8,067,385, or REP2006, REP2031, REP2055, STOPS™ (S-antigen transport-inhibiting oligonucleotide polymers), and those disclosed in Patent Application Publication Nos. WO200424919: WO201221985; and WO202097342 and U.S. Pat. Nos. 7,358,068:8,008,269; 8,008,270; and 8,067,385. The other agent can also be one or more Capsid Assembly Modulator (CAM). A method or a combination for use according to an embodiment of the application can further comprise one or more of interferons, such as interferon alpha or lambda, preferably a pegylated interferon, more preferably a pegylated interferon alpha-2a or pegylated interferon lambda-la. In some embodiments, an RNAi component of the disclosure can be administered together with both an NA and a CAM.

[0013] In some embodiments, the disclosure provides methods of treating HBV in a renally impaired subject, said method comprising subcutaneously administering to the subject a pharmaceutical composition comprising from about 100 mg to about 200 mg (e.g., about 100 mg, about 125 mg, about 150 mg or about 200 mg) of an RNAi component comprising
[0014] (i) a first RNAi agent comprising: an antisense strand comprising a nucleotide sequence of SEQ ID NO: 2 and a complementary sense strand (e.g., a sense strand comprising a nucleotide sequence of SEQ ID NO:11); and
[0015] (ii) a second RNAi agent comprising: an antisense strand comprising a nucleotide sequence of SEQ ID NO:8 and a complementary sense strand (e.g., a sense strand comprising a nucleotide sequence of SEQ ID NO:16):
[0016] or
[0017] (i) a first RNAi agent comprising: an antisense strand comprising a nucleotide sequence that is at least 70% homologous to SEQ ID NO:2 and a complementary sense strand comprising a nucleotide sequence that is at least 80% homologous to SEQ ID NO:11; and
[0018] (ii) a second RNAi agent comprising: an antisense strand comprising a nucleotide sequence that is at least 70% homologous to a sequence of SEQ ID NO:8 and a complementary sense strand comprising a nucleotide sequence that is at least 80% homologous to SEQ ID NO:16.
   wherein the molar ratio of the first RNAi agent to the second RNAi agent is about 2:1. In some such embodiments, the subject also is hepatically impaired.

[0019] In some embodiments, the disclosure provides methods of treating HBV in a renally impaired subject who has cirrhosis of the liver, said method comprising subcutaneously administering to the subject a pharmaceutical composition comprising from about 100 mg to about 200 mg (e.g., 100 mg, 125 mg, 150 mg, or 200 mg) of an RNAi component comprising
[0020] (i) a first RNAi agent comprising: an antisense strand comprising a nucleotide sequence of SEQ ID NO: 2 and a complementary sense strand (e.g., a sense strand comprising a nucleotide sequence of SEQ ID NO:11); and
[0021] (ii) a second RNAi agent comprising: an antisense strand comprising a nucleotide sequence of SEQ ID NO:8 and a complementary sense strand (e.g., a sense strand comprising a nucleotide sequence of SEQ ID NO:16):
[0022] or
[0023] (i) a first RNAi agent comprising: an antisense strand comprising a nucleotide sequence that is at least 70% homologous to SEQ ID NO:2 and a complementary sense strand comprising a nucleotide sequence that is at least 70% homologous to SEQ ID NO:11; and
[0024] (ii) a second RNAi agent comprising: an antisense strand comprising a nucleotide sequence that is at least 70% homologous to a nucleotide sequence of SEQ ID NO:8 and a complementary sense strand comprising a nucleotide sequence that is at least 70% homologous to SEQ ID NO:16.
   wherein the molar ratio of the first RNAi agent to the second RNAi agent is about 2:1. In some such embodiments, the subject has hepatorenal syndrome (HRS)

[0025] In some embodiments, the disclosure provides methods of treating HBV in a renally impaired subject, said method comprising subcutaneously administering to the subject a pharmaceutical composition comprising an RNAi component comprising
[0026] (i) a first RNAi agent comprising: an antisense strand comprising a nucleotide sequence of SEQ ID NO: 2 and a complementary sense strand (e.g., a sense strand comprising a nucleotide sequence of SEQ ID NO: 11; and
[0027] (ii) a second RNAi agent comprising: an antisense strand comprising a nucleotide sequence of SEQ ID NO:8 and a complementary sense strand comprising (e.g., a sense strand nucleotide sequence of SEQ ID NO:16.
[0028] or
[0029] (i) a first RNAi agent comprising: an antisense strand comprising a nucleotide sequence that is at least 70% homologous to SEQ ID NO:2 and a complementary sense strand comprising a nucleotide sequence that is at least 70% homologous to SEQ ID NO:11; and
[0030] (ii) a second RNAi agent comprising: an antisense strand comprising a nucleotide sequence that is at least 70% homologous to a sequence of SEQ ID NO:8 and a complementary sense strand comprising a nucleotide sequence that is at least 70% homologous to SEQ ID NO:16,
   wherein the molar ratio of the first RNAi agent to the second RNAi agent is about 2:1, and wherein the Cₘₐₓ of the first component is from about 1.500 ng/mL to about 4,000 ng/ml and the Cₘₐₓ of the second component is from about 200 ng/mL to about 1,000 ng/mL. In some embodiments, the Cₘₐₓ of the first component is from about 2,000 ng/mL to about 3,000 ng/ml and the Cₘₐₓ of the second component is from about 400 ng/mL to about 800 ng/mL. In some such embodiments, the renally impaired subject also is hepatically impaired. In some embodiments, the renally impaired subject has liver cirrhosis. In some such embodiments, the subject has hepatorenal syndrome (HRS)

[0031] In some embodiments, the disclosure provides methods of treating HBV in a renally impaired subject, said method comprising subcutaneously administering to the subject a pharmaceutical composition comprising an RNAi component comprising
[0032] (i) a first RNAi agent comprising: an antisense strand comprising a nucleotide sequence of SEQ ID NO: 2 and a complementary sense strand (e.g., a sense strand comprising a nucleotide sequence of SEQ ID NO:11); and
[0033] (ii) a second RNAi agent comprising: an antisense strand comprising a nucleotide sequence of SEQ ID NO:8 and a sense strand comprising a complementary nucleotide sequence (e.g., a sense strand comprising a sequence of SEQ ID NO:16):
[0034] or
[0035] (i) a first RNAi agent comprising: an antisense strand comprising a nucleotide sequence that is at least 70% homologous to SEQ ID NO:2 and a complementary sense strand comprising a nucleotide sequence that is at least 70% homologous to SEQ ID NO:11; and
[0036] (ii) a second RNAi agent comprising: an antisense strand comprising a nucleotide sequence that is at least 70% homologous to a sequence of SEQ ID NO:8 and a complementary sense strand comprising a nucleotide sequence that is at least 70% homologous to SEQ ID NO:16.
   wherein the molar ratio of the first RNAi agent to the second RNAi agent is about 2:1, and wherein the AUC_{∞} of the first component is from about 20,000 ng·h/mL to about 50,000 ng·h/mL and the AUC_{∞} of the second component is from about 3,000 ng·h/mL to about 12,000 ng·h/mL. In some embodiments, the AUC_{∞} of the first component is from about 30,000 ng·h/mL to about 40,000 ng·h/mL and the AUC_{∞} of the second component is from about 5,000 ng·h/mL to about 10,000 ng·h/mL. In some such embodiments, the renally impaired subject also is also hepatically impaired. In some embodiments, the renally impaired subject has liver cirrhosis. In some such embodiments, the subject has hepatorenal syndrome (HRS)

[0037] In some embodiments disclosed above, the first RNAi comprises an antisense strand comprising a nucleotide sequence that is at least 80% homologous to SEQ ID NO:2 and a complementary sense strand comprising a nucleotide sequence that is at least 80% homologous to SEQ ID NO: 11. In some embodiments, the first RNAi comprises an antisense strand comprising a nucleotide sequence that is at least 85% homologous to SEQ ID NO:2 and a complementary sense strand comprising a nucleotide sequence that is at least 85% homologous to SEQ ID NO:11. In some embodiments, the first RNAi comprises an antisense strand comprising a nucleotide sequence that is at least 90% homologous to SEQ ID NO:2 and a complementary sense strand comprising a nucleotide sequence that is at least 90% homologous to SEQ ID NO:11. In some embodiments, the first RNAi comprises an antisense strand comprising a nucleotide sequence that is at least 95% homologous to SEQ ID NO:2 and a complementary sense strand comprising a nucleotide sequence that is at least 95% homologous to SEQ ID NO:11.

[0038] In some embodiments disclosed above, the second RNAi comprises an antisense strand comprising a nucleotide sequence that is at least 80% homologous to SEQ ID NO:8 and a complementary sense strand comprising a nucleotide sequence that is at least 80% homologous to SEQ ID NO: 16. In some embodiments, the first RNAi comprises an antisense strand comprising a nucleotide sequence that is at least 85% homologous to SEQ ID NO:8 and a complementary sense strand comprising a nucleotide sequence that is at least 85% homologous to SEQ ID NO:16. In some embodiments, the first RNAi comprises an antisense strand comprising a nucleotide sequence that is at least 90% homologous to SEQ ID NO:8 and a complementary sense strand comprising a nucleotide sequence that is at least 90% homologous to SEQ ID NO:16. In some embodiments, the first RNAi comprises an antisense strand comprising a nucleotide sequence that is at least 95% homologous to SEQ ID NO:8 and a complementary sense strand comprising a nucleotide sequence that is at least 95% homologous to SEQ ID NO:16.

[0039] In some embodiments disclosed above, the first RNAi comprises an antisense strand comprising a nucleotide sequence that is at least 80% homologous to SEQ ID NO:2 and a complementary sense strand comprising a nucleotide sequence that is at least 80% homologous to SEQ ID NO: 11, and the second RNAi comprises an antisense strand comprising a nucleotide sequence that is at least 80% homologous to SEQ ID NO:8 and a complementary sense strand comprising a nucleotide sequence that is at least 80% homologous to SEQ ID NO:16. In some embodiments disclosed above, the first RNAi comprises an antisense strand comprising a nucleotide sequence that is at least 90% homologous to SEQ ID NO:2 and a complementary sense strand comprising a nucleotide sequence that is at least 90% homologous to SEQ ID NO:11, and the second RNAi comprises an antisense strand comprising a nucleotide sequence that is at least 90% homologous to SEQ ID NO:8 and a complementary sense strand comprising a nucleotide sequence that is at least 90% homologous to SEQ ID NO: 16. In some embodiments disclosed above, the first RNAi comprises an antisense strand comprising a nucleotide sequence that is at least 95% homologous to SEQ ID NO:2 and a complementary sense strand comprising a nucleotide sequence that is at least 95% homologous to SEQ ID NO: 11, and the second RNAi comprises an antisense strand comprising a nucleotide sequence that is at least 95% homologous to SEQ ID NO:8 and a complementary sense strand comprising a nucleotide sequence that is at least 95% homologous to SEQ ID NO:16.

[0040] In some embodiments, the disclosed methods further comprises administering to the subject another agent for treating infection caused by HBV. In some embodiments, the second therapeutic agent is a nucleoside/nucleotide analog (NA). In some such embodiments, the NA is entecavir (ETV), lamivudine or telbivudine (LDT). In some embodiments, the NA is adefovir or tenofovir (TDF). In particular embodiments, the NA is dosed orally under a dosing regimen that provides an effective amount of the drug to the subject. For instance, the NA can be dosed once daily to the subject. In some embodiments, the NA is administered at a dose that is less than typically administered to a subject with an HBV infection. For instance, the NA can be administered at a dose that is less than the recommended dose reflected on the label of the approved NA. Decreased doses of the NA limits renal toxicity often associated with these drugs.

[0041] Another general aspect of the application relates to a combination or a kit for use in treating a HBV infection, such as a chronic HBV infection (CHB), with or without viral co-infection, e.g., with or without co-infection with HDV and/or HCV and/or HIV, more particularly with or without co-infection with at least HDV, and/or for treating chronic HDV infection (CHD) in a subject in need thereof, comprising:
[0042] (1) a pharmaceutical composition comprising an RNAi component having:
[0043] (i) a first RNAi agent comprising: an antisense strand comprising a nucleotide sequence of any one of the following: SEQ ID NO:1, SEQ ID NO:2, SEQ ID NO:3, SEQ ID NO:4, SEQ ID NO:5, SEQ ID NO: 6, and SEQ ID NO:7 and a complementary sense strand (e.g., a sense strand comprising a nucleotide sequence of any one of the following: SEQ ID NO: 10, SEQ ID NO: 11, SEQ ID NO: 12, SEQ ID NO: 13, SEQ ID NO: 14, and SEQ ID NO: 15; and
[0044] (ii) a second RNAi agent comprising: an antisense strand comprising a nucleotide sequence of any one of the following: SEQ ID NO:8 and SEQ ID NO:9, and a sense strand comprising a complementary nucleotide sequence (e.g., a sense strand comprising a nucleotide sequence of any one of the following: SEQ ID NO: 16, SEQ ID NO:17, SEQ ID NO:18, and SEQ ID NO:19).

[0045] In some embodiments, the combination or kit is for use in enhancing an immune response, decreasing viral replication, and/or decreasing the expression of one or more Hepatitis B Virus (HBV) polypeptides, more particularly of one or more polypeptide(s) selected from HBsAg and HBeAg, in a subject with a Hepatitis B Virus (HBV) infection, more particularly a chronic HBV infection (CHB) with or without viral co-infection.

[0046] In some embodiments, the combination or kit further comprises another agent for treating infection caused by HBV.

[0047] Also provided herein is an effective amount of an RNAi component and optionally another agent for treating infection caused by HBV such as a nucleoside/nucleotide analog or a nucleic acid polymer (NAP), in the manufacture of a medicament for treating a HBV infection in a subject, enhancing an immune response in a subject with a HBV infection, decreasing viral replication in a subject with a HBV infection, decreasing the expression of one or more HBV polypeptide(s), more particularly of one or more polypeptide(s) from HBsAg and HBeAg, and/or increasing the targeted killing of hepatocytes comprising integrated viral DNA or extrachromosomal DNA in a subject with a HBV infection.

[0048] In some embodiments, the RNAi component are administered to the subject over the same treatment period for up to 2 years, up to 1 year, up to 6 months, or up to any time of 1 month to 2 years.

[0049] In other embodiments, the treatment comprises a first phase conducted before a second phase, and
[0050] a) the first phase comprises administering the RNAi component to the subject to thereby decrease the HBsAg to a level low enough to allow recovery of T cell function, preferably to a serum HBsAg level of less than 1000, 100, 10, or 1 IU/mL; and
[0051] b) the second phase comprises administering an additional compound or drug effective for treating hepatitis infection.

[0052] In certain embodiments, the second phase does not comprise administering the RNAi component to the subject. In other embodiments, the second phase further comprises administering the RNAi component to the subject. The first phase of the treatment can last about 1-24 months, such as 1-12 months, 1-3 months, 4-6 months, 7-9 months, 10-12 months, or any period of time in between. The second phase of the treatment can last about 1-24 months, such as 1-12 months, 4-6 months, 7-9 months, 10-12 months, 13-18 months, 19-24 months, or any period of time in between.

[0053] In some embodiments, the RNAi component is administered subcutaneously or intravenously, preferably subcutaneously, at an amount of about 40-1000 mg per dose, more particularly about 40-250 mg per dose, such as about 100-200 mg per dose, more particularly about 200 mg per dose, and it is administered weekly, every two weeks, every 4 weeks, monthly, every 2 months, or every 3 months, preferably every 4 weeks or monthly.

[0054] In some embodiments, a subject has achieved at least one of the following features a)-e), more particularly more than one of the following features a)-e), more particularly at least features a), b) and c), more particularly all of features a)-d), during or after the treatment with a combination according to an embodiment of the application:
[0055] a) decreased HBV replication as measured by serum HBV DNA level, preferably undetectable serum HBV DNA level;
[0056] b) decreased expression of one or more HBV polypeptide(s), preferably decreased expression of HBsAg as measured by serum HBsAg level, preferably undetectable serum HBsAg level;
[0057] c) enhanced HBV-specific T cell responses;
[0058] d) loss of HBeAg or serocoversion for HBeAg, if the subject is HBeAg positive before the treatment; and
[0059] e) seroconversion for HBsAg.

[0060] In some embodiments, an embodiment of the application is for use in treating a subject co-infected with CHB and another chronic infection with at least one of: hepatitis D virus (HDV); hepatitis C virus (HCV); or human immunodeficiency virus (HIV). The combination can be used in a method of decreasing the serum levels of HDV RNA in a subject chronically co-infected with both HBV and HDV; a method of normalizing alanine aminotransferase (ALT) level in a subject chronically co-infected with HBV and HDV; or a method of eradicating HDV infection in a subject chronically co-infected with HBV and HDV.

[0061] In any of the methods, the RNAi agent comprises at least one modified nucleotide or at least one modified internucleoside linkage. In another variation, at least 90% or substantially all of the nucleotides in the first and the second RNAi agents are modified nucleotides. In a further variation, the first or the second RNAi agent further comprises a targeting ligand that is conjugated to the first or the second RNAi agent. In one aspect, the targeting ligand comprises N-acetyl-galactosamine. In a particular aspect, the targeting ligand is selected from the group consisting of (NAG13), (NAG13)s, (NAG18), (NAG18)s, (NAG24), (NAG24)s, (NAG25), (NAG25)s, (NAG26), (NAG26)s, (NAG27), (NAG27)s, (NAG28), (NAG28)s, (NAG29), (NAG29)s, (NAG30), (NAG30)s, (NAG31), (NAG31)s, (NAG32), (NAG32)s, (NAG33), (NAG33)s, (NAG34), (NAG34)s, (NAG35), (NAG35)s, (NAG36), (NAG36)s, (NAG37), (NAG37)s, (NAG38), (NAG38)s, (NAG39), and (NAG39)s. In one variation, the targeting ligand is (NAG25), (NAG25)s, (NAG31), (NAG31)s, (NAG37), or (NAG37)s. In another variation, the targeting ligand is conjugated to the sense strand of the first or the second RNAi agent. In another variation, the targeting ligand is conjugated to the 5′ terminus of the sense stand of the first or the second RNAi agent. In still another variation, the first and the second RNAi agents independently comprise a duplex selected from the group consisting of: an antisense strand comprising SEQ ID NO: 1 and a sense strand comprising SEQ ID NO: 10; an antisense strand comprising SEQ ID NO:2 and a sense strand comprising SEQ ID NO: 11; an antisense strand comprising SEQ ID NO: 3 and a sense strand comprising SEQ ID NO: 11; an antisense strand comprising SEQ ID NO: 4 and a sense strand comprising SEQ ID NO: 12; an antisense strand comprising SEQ ID NO: 8 and a sense strand comprising SEQ ID NO: 16; an antisense strand comprising SEQ ID NO: 8 and a sense strand comprising SEQ ID NO: 17; an antisense strand comprising SEQ ID NO:2 and a sense strand comprising SEQ ID NO: 13; and an antisense strand comprising SEQ ID NO: 8 and a sense strand comprising SEQ ID NO: 18. In a particular variation, the first and the second RNAi agents are each independently conjugated to a targeting ligand comprising N-acetyl-galactosamine, and the first and the second RNAi agents independently comprise a duplex selected from the group consisting of: an antisense strand comprising SEQ ID NO:2 and a sense strand comprising SEQ ID NO: 11; an antisense strand comprising SEQ ID NO: 4 and a sense strand comprising SEQ ID NO: 12; an antisense strand comprising SEQ ID NO: 8 and a sense strand comprising SEQ ID NO: 16; an antisense strand comprising SEQ ID NO:2 and a sense strand comprising SEQ ID NO: 13; and an antisense strand comprising SEQ ID NO: 8 and a sense strand comprising SEQ ID NO: 18. In still another variation, the molar ratio of the first RNAi agent to the second RNAi agent is in the range of about 1:2 to about 5:1. In another variation, the molar ratio of the first RNAi agent to the second RNAi agent is about 2:1. In certain aspects, the first and the second RNAi agents are each independently conjugated to (NAG37) s, the first RNAi agent comprises an antisense strand comprising SEQ ID NO: 2 and a sense strand comprising SEQ ID NO: 11, and the second RNAi agent comprises an antisense strand comprising SEQ ID NO: 8 and a sense strand comprising SEQ ID NO: 16.

[0062] Other aspects, features and advantages of the invention will be apparent from the following disclosure, including the detailed description of the invention and its preferred embodiments and the appended claims.

### DETAILED DESCRIPTION OF THE INVENTION

### Definitions

[0063] Listed below are definitions of various terms used herein. These definitions apply to the terms as they are used throughout this specification and claims, unless otherwise limited in specific instances, either individually or as part of a larger group.

[0064] Unless defined otherwise, all technical and scientific terms used herein generally have the same meaning as commonly understood by one of ordinary skill in the art to which this invention belongs. Generally, the nomenclature used herein and the laboratory procedures in cell culture, molecular genetics, organic chemistry, and peptide chemistry are those well-known and commonly employed in the art.

[0065] As used herein, the articles “a” and “an” refer to one or to more than one (i.e., to at least one) of the grammatical object of the article. By way of example, “an element” means one element or more than one element. Furthermore, use of the term “including” as well as other forms, such as “include,” “includes,” and “included,” is not limiting.

[0066] As used in the specification and in the claims, the term “comprising” can include the embodiments “consisting of” and “consisting essentially of.” The terms “comprise(s),” “include(s),” “having.” “has,” “can,” “contain(s),” and variants thereof, as used herein, are intended to be open-ended transitional phrases, terms, or words that require the presence of the named ingredients/steps and permit the presence of other ingredients/steps. However, such description should be construed as also describing compositions or processes as “consisting of” and “consisting essentially of” the enumerated compounds, which allows the presence of only the named compounds, along with any pharmaceutically acceptable carriers, and excludes other compounds.

[0067] As used herein, approximating language can be applied to modify any quantitative representation that can vary without resulting in a change in the basic function to which it is related. Accordingly, a value modified by a term or terms, such as “substantially,” cannot be limited to the precise value specified, in some cases. In at least some instances, the approximating language can correspond to the precision of an instrument for measuring the value.

[0068] As used herein, the term “treatment” or “treating,” is defined as the application or administration of a therapeutic agent, i.e., a compound provided herein (alone or in combination with another pharmaceutical agent), to a subject (e.g., a human patient), or application or administration of a therapeutic agent to an isolated tissue or cell line from a patient (e.g., for diagnosis or ex vivo applications), who has HBV infection, in particular chronic HBV infection, a symptom of HBV infection or the potential to develop HBV infection, with the purpose to cure, heal, alleviate, relieve, alter, remedy, ameliorate, improve or affect HBV infection, the symptoms of HBV infection or the potential to develop HBV infection. Such treatments can be specifically tailored or modified, based on knowledge obtained from the field of pharmacogenomics.

[0069] As used herein, the term “patient,” “individual” or “subject” refers to a human or a non-human mammal. Non-human mammals include, for example, livestock and pets, such as ovine, bovine, porcine, canine, feline and murine mammals. Preferably, the patient, subject, or individual is human.

[0070] As used herein, “treatment naïve” refers to a patient, individual or subject not having previously received treatment with a drug, investigational or approved, for HBV infection, in particular a nucleoside or nucleotide analog drug or interferon product.

[0071] Alternatively, patients, individuals or subjects treated according to the methods of the disclosure can be “treatment experienced.” As used herein, “treatment experienced” refers to a patient, individual or subject who has had at least one previous course of an HBV antiviral therapy, in particular a nucleoside or nucleotide. Particular nucleosides or nucleotides include entecavir or a pharmaceutically acceptable salt or solvate thereof, such as entecavir monohydrate, or tenofovir or a salt or a prodrug thereof, such as tenofovir alafenamide or tenofovir disoproxil fumarate.

[0072] When used with respect to methods of treatment and the use of the compounds and pharmaceutical compositions thereof described herein, an individual “in need thereof” may be an individual who has been diagnosed with or previously treated for the condition to be treated. Typically, when a step of administering a compound provided herein, the method further contemplates a step of identifying an individual or subject in need of the particular treatment to be administered or having the particular condition to be treated.

[0073] As used herein, the term “pharmaceutically acceptable” refers to a material, such as a carrier or diluent, which does not abrogate the biological activity or properties of the compound, and is relatively non-toxic, i.e., the material can be administered to an individual without causing undesirable biological effects or interacting in a deleterious manner with any of the components of the composition in which it is contained.

[0074] As used herein, the term “pharmaceutically acceptable salt” refers to derivatives of the disclosed compounds wherein the parent compound is modified by converting an existing acid or base moiety to its salt form. Examples of pharmaceutically acceptable salts include, but are not limited to, mineral or organic acid salts of basic residues such as amines; alkali or organic salts of acidic residues such as carboxylic acids; and the like. The pharmaceutically acceptable salts provided herein include the conventional non-toxic salts of the parent compound formed, for example, from non-toxic inorganic or organic acids. The pharmaceutically acceptable salts provided herein can be synthesized from the parent compound which contains a basic or acidic moiety by conventional chemical methods. Generally, such salts can be prepared by reacting the free acid or base forms of these compounds with a stoichiometric amount of the appropriate base or acid in water or in an organic solvent, or in a mixture of the two; generally, nonaqueous media like ether, ethyl acetate, ethanol, isopropanol, or acetonitrile are preferred. Lists of suitable salts are found in Remington's Pharmaceutical Sciences, 17th ed., Mack Publishing Company, Easton, Pa., 1985, p. 1418 and Journal of Pharmaceutical Science, 66, 2 (1977), each of which is incorporated herein by reference in its entirety.

[0075] As used herein, the term “composition” or “pharmaceutical composition” refers to a mixture of at least one compound provided herein with a pharmaceutically acceptable carrier. The pharmaceutical composition facilitates administration of the compound to a patient or subject. Multiple techniques of administering a compound exist in the art including, but not limited to, intravenous, oral, aerosol, parenteral, ophthalmic, pulmonary and topical administration.

[0076] As used herein, the term “pharmaceutically acceptable carrier” means a pharmaceutically acceptable material, composition or carrier, such as a liquid or solid filler, stabilizer, dispersing agent, suspending agent, diluent, excipient, thickening agent, solvent or encapsulating material, involved in carrying or transporting a compound provided herein within or to the patient such that it can perform its intended function. Typically, such constructs are carried or transported from one organ, or portion of the body, to another organ, or portion of the body. Each carrier must be “acceptable” in the sense of being compatible with the other ingredients of the formulation, including the compound provided herein, and not injurious to the patient. Some examples of materials that can serve as pharmaceutically acceptable carriers include: sugars, such as lactose, glucose and sucrose; starches, such as corn starch and potato starch; cellulose, and its derivatives, such as sodium carboxymethyl cellulose, ethyl cellulose and cellulose acetate; powdered tragacanth; malt; gelatin; talc; excipients, such as cocoa butter and suppository waxes; oils, such as peanut oil, cottonseed oil, safflower oil, sesame oil, olive oil, corn oil and soybean oil; glycols, such as propylene glycol; polyols, such as glycerin, sorbitol, mannitol and polyethylene glycol; esters, such as ethyl oleate and ethyl laurate; agar; buffering agents, such as magnesium hydroxide and aluminum hydroxide; surface active agents; alginic acid; pyrogen-free water; isotonic saline; Ringer's solution; ethyl alcohol; phosphate buffer solutions; and other non-toxic compatible substances employed in pharmaceutical formulations. As used herein, “pharmaceutically acceptable carrier” also includes any and all coatings, antibacterial and antifungal agents, and absorption delaying agents, and the like that are compatible with the activity of the compound provided herein, and are physiologically acceptable to the patient. Supplementary active compounds can also be incorporated into the compositions. The “pharmaceutically acceptable carrier” can further include a pharmaceutically acceptable salt of the compound provided herein. Other additional ingredients that can be included in the pharmaceutical compositions provided herein are known in the art and described, for example in Remington's Pharmaceutical Sciences (Genaro. Ed., Mack Publishing Co., 1985, Easton, PA), which is incorporated herein by reference.

[0077] The term “tablet,” as used herein, denotes an orally administrable, single-dose, solid dosage form that can be produced by compressing a drug substance or a pharmaceutically acceptable salt thereof, with suitable excipients (e.g., fillers, disintegrants, lubricants, glidants, and/or surfactants) by conventional tableting processes. The tablet can be produced using conventional granulation methods, for example, wet or dry granulation, with optional comminution of the granules with subsequent compression and optional coating. The tablet can also be produced by spray-drying.

[0078] As used herein, the terms “effective amount,” “pharmaceutically effective amount,” and “therapeutically effective amount” refer to a nontoxic but sufficient amount of an agent to provide the desired biological result. That result may be reduction or alleviation of the signs, symptoms, or causes of a disease, or any other desired alteration of a biological system. An appropriate therapeutic amount in any individual case may be determined by one of ordinary skill in the art using routine experimentation.

[0079] The term “combination”, “therapeutic combination”, “pharmaceutical combination”, or “combination product” as used herein refer to a non-fixed combination or a kit of parts for the combined administration where two or more therapeutic agents can be administered independently, at the same time or separately within time intervals, especially where these time intervals allow that the combination partners show a cooperative, e.g., synergistic, effect.

[0080] As used herein “Adverse Event (AE)” is any untoward medical event that occurs in a subject administered with an investigational product, e.g., an RNAi component disclosed herein or a pharmaceutical formulation thereof, and it does not necessarily indicate only events with clear causal relationship with the relevant investigational product.

[0081] As used herein, the term “alkyl,” by itself or as part of another substituent means, unless otherwise stated, a straight or branched chain hydrocarbon having the number of carbon atoms designated (i.e., C₁-C₆-alkyl means an alkyl having one to six carbon atoms) and includes straight and branched chains. In an embodiment, C₁-C₆ alkyl groups are provided herein. Examples include methyl, ethyl, propyl, isopropyl, butyl, isobutyl, tert-butyl, pentyl, neopentyl, and hexyl. Other examples of C₁-C₆-alkyl include ethyl, methyl, isopropyl, isobutyl, n-pentyl, and n-hexyl.

[0082] As used herein, the term “alkoxy” refers to an alkyl (carbon and hydrogen chain) group singular bonded to oxygenlike for instance a methoxy group or ethoxy group.

[0083] As used herein, the term “amino” refers to a functional group having the formulae —NH₂, —NH(alkyl), and —N(alkyl)₂, wherein alkyl is as defined herein.

[0084] As used herein, the term “amide” refers to a functional group having the formulae —C(O)N(R)₂ or —N(R)C(O)alkyl, wherein the carbon atom is doubly bound to the oxygen atom and R is independently at each occurrence hydrogen or alkyl.

[0085] As used herein, the term “ester” refers to a functional group having the formulae —C(O)alkoxy, CO₂alkyl, —OC(O)alkyl, wherein the carbon atom is doubly bound to one oxygen atom and singly bound to an alkoxy group as defined herein.

[0086] As used herein, the term “halo” or “halogen” alone or as part of another substituent means, unless otherwise stated, a fluorine, chlorine, bromine, or iodine atom, preferably, fluorine, chlorine, or bromine, more preferably, fluorine or chlorine.

[0087] As used herein, the term “nitrile” refers to the functional group —CN, where carbon is triply bound to nitrogen.

[0088] As used herein, the term “heterocycle” refers to molecules that are saturated or partially saturated an include tetrahydrofuran, oxetane, dioxane or other cyclic ethers. Heterocycle also includes bicyclic structures that may be bridged or spirocyclic in nature with each individual ring within the bicycle varying from 3-8 atoms, and containing 0, 1, or 2 N, O, or S atoms. The term “heterocyclyl” includes cyclic esters (i.e., lactones) and cyclic amides (i.e., lactams) and also specifically includes, but is not limited to, epoxidyl, oxetanyl, tetrahydrofuranyl, tetrahydropyranyl (i.e., oxanyl), pyranyl, dioxanyl, aziridinyl, azetidinyl, pyrrolidinyl, 2,5-dihydro-1H-pyrrolyl, oxazolidinyl, thiazolidinyl, piperidinyl, morpholinyl, piperazinyl, thiomorpholinyl, 1,3-oxazinanyl, 1,3-thiazinanyl, 2-azabicyclo[2.1.1]hexanyl, 5-azabicyclo[2.1.1]hexanyl, 6-azabicyclo[3.1.1]heptanyl, 2-azabicyclo[2.2.1]heptanyl, 3-azabicyclo[3.1.1]heptanyl, 2-azabicyclo[3.1.1]heptanyl, 3-azabicyclo[3.1.0]hexanyl, 2-azabicyclo[3.1.0]hexanyl, 3-azabicyclo[3.2.1]octanyl, 8-azabicyclo[3.2.1]octanyl, 3-oxa-7-azabicyclo[3.3.1]nonanyl, 3-oxa-9-azabicyclo[3.3.1]nonanyl, 2-oxa-5-azabicyclo[2.2.1]heptanyl, 6-oxa-3-azabicyclo[3.1.1]heptanyl, 2-azaspiro[3.3]heptanyl, 2-oxa-6-azaspiro[3.3]heptanyl, 2-oxaspiro[3.3]heptanyl, 2-oxaspiro[3.5]nonanyl, 3-oxaspiro[5.3]nonanyl, and 8-oxabicyclo[3.2.1]octanyl.

[0089] It will be understood that when a carbon is in the (R)-configuration, this implies that said carbon is an asymmetric carbon. As the skilled person will acknowledge, symmetric carbons, not being stereocenters, cannot be in the (R)- or (S)-configuration. Only asymmetric carbons can be in said configurations. Thus, it will be understood that the carbon of R³ bonded to the amine in the 4-position of the quinazoline is an asymmetric carbon.

[0090] Whenever substituents are represented by chemical structure. “---” represents the bond of attachment to the remainder of the molecule. Lines (such as “---”) drawn into a particular ring of a ring system indicate that the bond may be attached to any of the suitable ring atoms.

[0091] HBV infections that may be treated according to the disclosed methods include HBV genotype A, B, C, and/or D infections. However, in an embodiment, the methods disclosed may treat any HBV genotype (“pan-genotypic treatment”). HBV genotyping may be performed using methods known in the art, for example, INNO-LIPA® HBV Genotyping. Innogenetics N.V., Ghent, Belgium).

[0092] As used herein, the term “level of renal sufficiency” means the level of renal (kidney) functioning an individual. As used herein, the levels of renal sufficiency in an individual include: no renal impairment, mild renal impairment, moderate renal impairment, severe renal impairment and end stage renal disease (ESRD). The term renal impairment includes mild renal impairment, moderate renal impairment, severe renal impairment and end stage renal disease (ESRD).

[0093] As used herein, “no renal impairment” means the individual has normal renal function. Levels of renal function, renal sufficiency or renal impairment can be determined using any of the methods known in the art or described herein. Regarding terms such as “mild renal impairment”, “moderate renal impairment”, “severe renal impairment” and “end stage renal disease (ESRD)” cut-offs to define these levels of renal sufficiency are dependent on the test done to determine the level of renal sufficiency.

[0094] Different thresholds or cut-offs can be used to determine the level of renal sufficiency in an individual depending on the technique used and the interpretation of the health care practitioner. Several variables can be considered when determining the level of renal sufficiency in an individual including, for example, whether an individual is obese, the individual's race, the individual's gender, and the individual's age. Recommendations regarding classification of renal sufficiency are known in the art. These recommendations may change over time as newer techniques or better equations are used to more accurately determine renal function in an individual. Regarding the methods of determining if the level of renal sufficiency in an individual, in some embodiments the level of renal sufficiency is determined by serum creatinine level in the individual. In some embodiments, the method of determining the level of renal sufficiency in the individual is not specified. In some embodiments the individual is asked about their level of renal sufficiency either orally or on a form.

[0095] The levels of renal sufficiency of an individual can include, for example, no renal impairment (i.e., normal renal function), mild renal impairment, moderate renal impairment, severe renal impairment and ESRD. In some embodiments, the level of renal sufficiency is not specified.

[0096] The level of renal sufficiency in an individual can also be determined for the first time when the individual visits the health care practitioner. In some embodiments, an individual is asked orally or in writing a series of questions to determine the individual's level of renal sufficiency. Questions can include asking about risk factors that are related to renal sufficiency. Risk factors relevant to an individual's level of renal sufficiency include, for example, does the individual have diabetes, high blood pressure, gout, coronary artery disease, congestive heart failure, severe liver disease or a history of kidney surgery. Other risk factors associated with renal impairment that can be included are, for example, advanced age (for example, 60 years old or older), being male, use of a nephrotoxic drug such as furosemide, chemotherapy or HIV infection, protein in the urine, or a solitary kidney.

[0097] In some embodiments, an individual is given a test to determine the level of renal sufficiency of the individual. For example, a health care practitioner can order urinalysis or a blood panel for the individual. Urinalysis can include, for example, timed urine collection or a 24 hour urine collection. Urine can be analyzed for the level of protein, glucose, ketones or abnormal debris called casts or the level of specific markers such as creatinine can be determined. A blood panel can be analyzed for markers such as creatinine, blood urea nitrogen (BUN), and electrolytes, for example.

[0098] In some embodiments, the renally impaired patients are also hepatically impaired. Hepatic impairment is a condition wherein normal functioning of the liver reduced. Hepatic impairment can be acute, with rapid onset, or chronic. Chronic hepatic impairment, or cirrhosis, can occur from many causes, such as excessive consumption of alcohol, hepatitis, autoimmune disease, heredity, or metabolism, or can be idiopathic. Liver damage is generally irreversible, and treatment consists of prevention of progression and treatment of symptoms. In severe cases, liver transplant is the only option. Hepatic impairment can exhibit no significant symptoms, or may be characterized by such symptoms as reduced ability for the blood to clot (coagulopathy) and brain dysfunction (encephalopathy), fluid retention in the abdominal cavity, increased infection risk, hypogonadism, change in liver size, jaundice, and increased sensitivity to medication. The Child-Pugh score is a system for assessing the prognosis of hepatic impairment—including the required strength of treatment and necessity of liver transplant—of chronic liver disease, primarily cirrhosis. It provides a forecast of the increasing severity of the liver disease.

[0099] Child-Pugh Group, Child-Pugh Class, and the like: a ranking of level of hepatic impairment based on the Child-Pugh Score. Child-Pugh Scores of 5-6 are classified as Child-Pugh Class A (mild hepatic impairment) and have an expected 2 year survival rate of 85%. Child-Pugh Scores of 7-9 are classified as Child-Pugh Class B (moderate hepatic impairment) and have an expected 2 year survival rate of 57%. Child-Pugh Scores of 10-15 are classified as Child-Pugh Class C (severe hepatic impairment) and have an expected 2 year survival rate of 35%.

[0100] Child-Pugh Score: a score based on five clinical measures of hepatic impairment, including levels of total bilirubin, serum albumin, PT INR, ascites, and hepatic encephalopathy. Each measure is given a ranking of 1, 2, or 3, and the sum of the five rankings is the Child-Pugh Score. The Child-Pugh Score can be used to classify hepatic impairment by placing subjects in a Child-Pugh Group.

[0101] The levels of hepatic sufficiency of an individual can include, for example, no hepatic impairment (i.e., normal hepatic function), mild hepatic impairment, moderate hepatic impairment, severe hepatic impairment. In some embodiments, the level of hepatic sufficiency is not specified.

[0102] As used herein, unless otherwise noted, the term “isolated form” means that the compound is present in a form which is separate from any biological environment (e.g., plasma, blood, gastric fluids, urine, cerebrospinal fluid, and the like).

[0103] In particular embodiments of the application, a therapeutically effective amount refers to the amount of a composition or therapeutic combination which is sufficient to achieve one, two, three, four, or more of the following effects: (i) reduce or ameliorate the severity of an HBV infection or a symptom associated therewith; (ii) reduce the duration of an HBV infection or symptom associated therewith; (iii) prevent the progression of an HBV infection or symptom associated therewith; (iv) cause regression of an HBV infection or symptom associated therewith; (v) prevent the development or onset of an HBV infection, or symptom associated therewith; (vi) treat or retreat a chronic HBV infection that recurs due to relapse after functional cure is achieved or symptom associated therewith; (vii) prevent the recurrence of an HBV infection or symptom associated therewith; (viii) reduce hospitalization of a subject having an HBV infection; (ix) reduce hospitalization length of a subject having an HBV infection; (x) increase the survival of a subject with an HBV infection; (xi) eliminate an HBV infection in a subject; (xii) inhibit or reduce HBV replication in a subject; and/or (xiii) enhance or improve the prophylactic or therapeutic effect(s) of another therapy.

[0104] A therapeutically effective amount can also be an amount of the compound sufficient to reduce HBsAg levels consistent with evolution to clinical seroconversion; achieve sustained HBsAg clearance associated with reduction of infected hepatocytes by a subject's immune system; induce HBV-antigen specific activated T-cell populations; and/or achieve persistent loss of HBsAg during or after treatment that then preferably persists at 6 months or more after the end of treatment, most preferably for life.

[0105] As used herein, the terms and phrases “in combination,” “in combination with,” “co-delivery,” and “administered together with” in the context of the administration of two or more therapies or components to a subject refers to simultaneous administration or subsequent administration of two or more therapies or components, such as two vectors, e.g., DNA plasmids, peptides, or a therapeutic combination and an adjuvant. “Simultaneous administration” or “simultaneously administered” refers to administration of the two or more therapies or components within the same treatment period, e.g., at least within the same day. When two components are “administered together with,” “administered in combination with,” or “administered within the same treatment period.” they can be administered in separate compositions sequentially within a short time period. “Overlapping administration” refers to administration of the two or more therapies or components not within the same overall treatment period, but with at least one overlapping treatment period. “Subsequent administration” can be administration of the two or more therapies or components during different treatment periods, one after the other. The use of the term “in combination with” does not restrict the order in which therapies or components are administered to a subject. For example, a first therapy or component (e.g., an RNAi component) can be administered prior to (e.g., 5 minutes to one hour before), concomitantly with or simultaneously with, or subsequent to (e.g., 5 minutes to one hour after) the administration of a second therapy or component. In other embodiments, a first therapy or component (e.g., an RNAi component) and a second therapy or component or a stereoisomer or a tautomeric form thereof), a pharmaceutically acceptable salt or a solvate thereof are administered in separate compositions, such as two separate compositions.

### RNAi Component

[0106] In one aspect, the RNAi component comprises one or more RNAi agents. Each RNAi agent disclosed herein includes at least a sense strand and an antisense strand. The sense strand and the antisense strand can be partially, substantially, or fully complementary to each other. The length of the RNAi agent sense and antisense strands described herein each can be 16 to 30 nucleotides in length. In some embodiments, the sense and antisense strands are independently 17 to 26 nucleotides in length. In some embodiments, the sense and antisense strands are independently 19 to 26 nucleotides in length. In some embodiments, the sense and antisense strands are independently 21 to 26 nucleotides in length. In some embodiments, the sense and antisense strands are independently 21 to 24 nucleotides in length. The sense and antisense strands can be either the same length or different lengths. The HBV RNAi agents disclosed herein have been designed to include antisense strand sequences that are at least partially complementary to a sequence in the HBV genome that is conserved across the majority of known serotypes of HBV. The RNAi agents described herein, upon delivery to a cell expressing HBV, inhibit the expression of one or more HBV genes in vivo or in vitro.

[0107] An RNAi agent includes a sense strand (also referred to as a passenger strand) that includes a first sequence, and an antisense strand (also referred to as a guide strand) that includes a second sequence. A sense strand of the HBV RNAi agents described herein includes a core stretch having at least about 85% identity to a nucleotide sequence of at least 16 consecutive nucleotides in an HBV mRNA. In some embodiments, the sense strand core nucleotide stretch having at least about 85% identity to a sequence in an HBV mRNA is 16, 17, 18, 19, 20, 21, 22, or 23 nucleotides in length. An antisense strand of an HBV RNAi agent comprises a nucleotide sequence having at least about 85% complementary over a core stretch of at least 16 consecutive nucleotides to a sequence in an HBV mRNA and the corresponding sense strand. In some embodiments, the antisense strand core nucleotide sequence having at least about 85% complementarity to a sequence in an HBV mRNA or the corresponding sense strand is 16, 17, 18, 19, 20, 21, 22, or 23 nucleotides in length.

[0108] In some embodiments, the RNAi component comprises a first RNAi agent comprising an antisense strand comprising a nucleotide sequence of any one of the following: SEQ ID NO: 1, SEQ ID NO: 2, SEQ ID NO:3, SEQ ID NO: 4, SEQ ID NO: 5, SEQ ID NO:6, and SEQ ID NO:7, and a complementary sense strand (e.g., a sense strand comprising a nucleotide sequence of any one of the following: SEQ ID NO: 10, SEQ ID NO:11, SEQ ID NO:12, SEQ ID NO:13, SEQ ID NO:14, and SEQ ID NO: 15), or a second RNAi agent comprising an antisense strand comprising a nucleotide sequence of any one of the following: SEQ ID NO:8 and SEQ ID NO:9, and a complementary sense strand (e.g., a sense comprising a nucleotide sequence of any one of the following: SEQ ID NO:16, SEQ ID NO:17, SEQ ID NO:18, and SEQ ID NO:19). In some embodiments, the RNAi component comprises a first RNAi agent comprising an antisense strand comprising a nucleotide sequence of any one of the following: SEQ ID NO:1, SEQ ID NO:2, SEQ ID NO:3, SEQ ID NO: 4, SEQ ID NO: 5, SEQ ID NO:6, and SEQ ID NO:7, and a complementary sense strand (e.g., a sense strand comprising a nucleotide sequence of any one of the following: SEQ ID NO: 10, SEQ ID NO:11, SEQ ID NO:12, SEQ ID NO:13, SEQ ID NO:14, and SEQ ID NO:15), and a second RNAi agent comprising an antisense strand comprising a nucleotide sequence of any one of the following: SEQ ID NO:8 and SEQ ID NO:9, and a complementary sense strand (e.g., a sense strand comprising a nucleotide sequence of any one of the following: SEQ ID NO:16, SEQ ID NO:17, SEQ ID NO:18, and SEQ ID NO:19).

[0109] In some embodiments, the first and the second RNAi agents disclosed herein comprise any of the sequences in Table 1.

TABLE 1
Exemplary sequences for first and second RNAi agents

| Antisense | | Sense | |
|---|---|---|---|
| SEQ | Unmodified sequence | SEQ | Unmodified sequence |
| ID NO | (5′→3′) | ID NO | (5′→3′) |
| 5 | AGAAAAUUGAGAGAAGUCCAC | 14 | GUGGACUUCUCUCAAUUUUCU |
| 6 | AGAAAAUUGAGAGAAGUCCAC | 14 | GUGGACUUCUCUCAAUUUUCU |
| | UU | | |
| 7 | AGAAAAUUGAGAGAAGUCCAC | 15 | GGUGGACUUCUCUCAAUUUUC |
| | C | | U |
| 9 | UACCAAUUUAUGCCUACAGCG | 19 | CGCUGUAGGCAUAAAUUGGUA |

### Targeting Group

[0110] In some embodiments, the RNAi agents are delivered to target cells or tissues using any oligonucleotide delivery technology known in the art. Nucleic acid delivery methods include, but are not limited to, by encapsulation in liposomes, by iontophoresis, or by incorporation into other vehicles, such as hydrogels, cyclodextrins, biodegradable nanocapsules, and bioadhesive microspheres, proteinaceous vectors or Dynamic Polyconjugates (DPCs) (see, for example WO 2000/053722, WO 2008/0022309, WO 2011/104169, and WO 2012/083185, each of which is incorporated herein by reference). In some embodiments, an HBV RNAi agent is delivered to target cells or tissues by covalently linking the RNAi agent to a targeting group. In some embodiments, the targeting group can include a cell receptor ligand, such as an asialoglycoprotein receptor (ASGPr) ligand. In some embodiments, an ASGPr ligand includes or consists of a galactose derivative cluster. In some embodiments, a galactose derivative cluster includes an N-acetyl-galactosamine trimer or an N-acetyl-galactosamine tetramer. In some embodiments, a galactose derivative cluster is an N-acetyl-galactosamine trimer or an N-acetyl-galactosamine tetramer.

[0111] A targeting group can be linked to the 3′ or 5′ end of a sense strand or an antisense strand of an HBV RNAi agent. In some embodiments, a targeting group is linked to the 3′ or 5′ end of the sense strand. In some embodiments, a targeting group is linked to the 5′ end of the sense strand. In some embodiments, a targeting group is linked to the RNAi agent via a linker.

[0112] In some embodiments, the RNAi component comprises a combination or cocktail of a first and a second RNAi agent having different nucleotide sequences. In some embodiments, the first and the second RNAi agents are each separately and independently linked to targeting groups. In some embodiments, the first and the second RNAi agents are each linked to targeting groups comprised of N-acetyl-galactosamines. In some embodiments, when first and the second RNAi agents are included in a composition, each of the RNAi agents is linked to the same targeting group. In some embodiments, when first and the second RNAi agents are included in a composition, each of the RNAi agents is linked to different targeting groups, such as targeting groups having different chemical structures.

[0113] In some embodiments, targeting groups are linked to the first and the second RNAi agents without the use of an additional linker. In some embodiments, the targeting group is designed having a linker readily present to facilitate the linkage to the first or the second RNAi agent. In some embodiments, when the first and the second RNAi agents are included in a composition, the first and the second RNAi agents may be linked to the targeting groups using the same linkers. In some embodiments, when the first and the second RNAi agents are included in a composition, the first and the second RNAi agents are linked to the targeting groups using different linkers.

[0114] Examples of targeting groups and linking groups are provided in Table 2. The non-nucleotide group can be covalently linked to the 3′ and/or 5′ end of either the sense strand and/or the antisense strand. In some embodiments, the first or second RNAi agent contains a non-nucleotide group linked to the 3′ and/or 5′ end of the sense strand. In some embodiments, a non-nucleotide group is linked to the 5′ end of the first or second RNAi agent sense strand. A non-nucleotide group may be linked directly or indirectly to the first or second RNAi agent via a linker/linking group. In some embodiments, a non-nucleotide group is linked to the first or second RNAi agent via a labile, cleavable, or reversible bond or linker.

[0115] Targeting groups and linking groups include the following, for which their chemical structures are provided below in Table 2: (PAZ), (NAG13), (NAG13)s, (NAG18), (NAG18)s, (NAG24), (NAG24)s, (NAG25), (NAG25)s, (NAG26), (NAG26)s, (NAG27), (NAG27)s, (NAG28), (NAG28)s, (NAG29), (NAG29)s, (NAG30), (NAG30)s, (NAG31), (NAG31)s, (NAG32), (NAG32)s, (NAG33), (NAG33)s, (NAG34), (NAG34)s, (NAG35), (NAG35)s, (NAG36), (NAG36)s, (NAG37), (NAG37)s, (NAG38), (NAG38)s, (NAG39), (NAG39)s. Each sense strand and/or antisense strand can have any targeting groups or linking groups listed above, as well as other targeting or linking groups, conjugated to the 5′ and/or 3′ end of the sequence.

TABLE 2
Structures Representing Various Modified Nucleotides, Targeting Groups, and
Linking Groups

| | |
|---|---|
| [chemical structure] | [chemical structure] |
| [chemical structure] | [chemical structure] |
| [chemical structure] | [chemical structure] |

When positioned internally on oligonucleotide:
linkage towards 5′ end of
oligonucleotide

[chemical structure]

linkage towards 3′ end of
oligonucleotide
(invAb)
When positioned internally on oligonucleotide:
linkage towards 5′ end of
oligonucleotide

[chemical structure]

linkage towards 3′ end of
oligonucleotide
(invAb)s
When positioned at the 3′ terminal end of oligonucleotide:
linkage towards 5′ end of
oligonucleotide

[chemical structure]

(invAb)

[chemical structure]

(PAZ)

[chemical structure]

(NAG13)

[chemical structure]

(NAG13)s

[chemical structure]

(NAG18)

[chemical structure]

(NAG18)s

[chemical structure]

(NAG24)

[chemical structure]

(NAG24)s

[chemical structure]

(NAG25)

[chemical structure]

(NAG25)s

[chemical structure]

(NAG26)

[chemical structure]

(NAG26)s

[chemical structure]

(NAG27)

[chemical structure]

(NAG27)s

[chemical structure]

(NAG28)

[chemical structure]

(NAG28)s

[chemical structure]

(NAG29)

[chemical structure]

(NAG29)s

[chemical structure]

(NAG30)

[chemical structure]

(NAG30)s

[chemical structure]

(NAG)31

[chemical structure]

(NAG31)s

[chemical structure]

(NAG32)

[chemical structure]

(NAG32)s

[chemical structure]

(NAG33)

[chemical structure]

(NAG33)s

[chemical structure]

(NAG34)

[chemical structure]

(NAG34)s

[chemical structure]

(NAG35)

[chemical structure]

(NAG35)s

[chemical structure]

(NAG36)

[chemical structure]

(NAG36)s

[chemical structure]

(NAG37)

[chemical structure]

(NAG37)s

[chemical structure]

(NAG 38)

[chemical structure]

(NAG38)s

[chemical structure]

(NAG39)

[chemical structure]

(NAG39)s

### Modified Nucleotides

[0116] In some embodiments, the first or the second RNAi agent contains one or more modified nucleotides. As used herein, a “modified nucleotide” is a nucleotide other than a ribonucleotide (2′-hydroxyl nucleotide). In some embodiments, at least 50% (e.g., at least 60%, at least 70%, at least 80%, at least 90%, at least 95%, at least 97%, at least 98%, at least 99%, or 100%) of the nucleotides are modified nucleotides. As used herein, modified nucleotides include, but are not limited to, deoxyribonucleotides, nucleotide mimics, abasic nucleotides (represented herein as Ab), 2′-modified nucleotides, 3′ to 3′ linkages (inverted) nucleotides (represented herein as invdN, invN, invn, invAb), non-natural base-comprising nucleotides, bridged nucleotides, peptide nucleic acids (PNAs), 2′,3′-seco nucleotide mimics (unlocked nucleobase analogs, represented herein as NUNA or NUNA), locked nucleotides (represented herein as NLNA or NLNA), 3′-O-methoxy (2′ internucleoside linked) nucleotides (represented herein as 3′-OMen), 2′-F-Arabino nucleotides (represented herein as NfANA or NfANA), 5′-Me, 2′-fluoro nucleotide (represented herein as 5Me-Nf), morpholino nucleotides, vinyl phosphonate deoxyribonucleotides (represented herein as vpdN), vinyl phosphonate containing nucleotides, and cyclopropyl phosphonate containing nucleotides (cPrpN). 2′-modified nucleotides (i.e., a nucleotide with a group other than a hydroxyl group at the 2′ position of the five-membered sugar ring) include, but are not limited to, 2′-O-methyl nucleotides (represented herein as a lower case letter ‘n’ in a nucleotide sequence), 2′-deoxy-2′-fluoro nucleotides (represented herein as Nf, also represented herein as 2′-fluoro nucleotide), 2′-deoxy nucleotides (represented herein as dN), 2′-methoxyethyl (2′-O-2-methoxylethyl) nucleotides (represented herein as NM or 2′-MOE), 2′-amino nucleotides, and 2′-alkyl nucleotides. It is not necessary for all positions in a given compound to be uniformly modified. Conversely, more than one modification can be incorporated in the first or second RNAi agent or even in a single nucleotide thereof. The RNAi agent sense strands and antisense strands may be synthesized and/or modified by methods known in the art. Modification at one nucleotide is independent of modification at another nucleotide.

[0117] Modified nucleobases include synthetic and natural nucleobases, such as 5-substituted pyrimidines, 6-azapyrimidines and N-2, N-6 and O-6 substituted purines, (e.g., 2-aminopropyladenine, 5-propynyluracil, or 5-propynylcytosine), 5-methylcytosine (5-me-C), 5-hydroxymethyl cytosine, xanthine, hypoxanthine, 2-aminoadenine, 6-alkyl (e.g., 6-methyl, 6-ethyl, 6-isopropyl, or 6-n-butyl) derivatives of adenine and guanine, 2-alkyl (e.g., 2-methyl, 2-ethyl, 2-isopropyl, or 2-n-butyl) and other alkyl derivatives of adenine and guanine, 2-thiouracil, 2-thiothymine, 2-thiocytosine, 5-halouracil, cytosine, 5-propynyl uracil, 5-propynyl cytosine, 6-azo uracil, 6-azo cytosine, 6-azo thymine, 5-uracil (pseudouracil), 4-thiouracil, 8-halo, 8-amino, 8-sulfhydryl, 8-thioalkyl, 8-hydroxyl and other 8-substituted adenines and guanines, 5-halo (e.g., 5-bromo), 5-trifluoromethyl, and other 5-substituted uracils and cytosines, 7-methylguanine and 7-methyladenine, 8-azaguanine and 8-azaadenine, 7-deazaguanine, 7-deazaadenine, 3-deazaguanine, and 3-deazaadenine.

[0118] In some embodiments, all or at least 90% of the nucleotides of the first or the second RNAi agent are modified nucleotides. As used herein, an RNAi agent wherein at least 90% of the nucleotides present are modified nucleotides is an RNAi agent having four or fewer (i.e., 0, 1, 2, 3, or 4) nucleotides in both the sense strand and the antisense strand being ribonucleotides. As used herein, a sense strand, wherein at least 90% of the nucleotides present are modified nucleotides, is a sense strand having two or fewer (i.e., 0, 1, or 2) nucleotides in the sense strand being ribonucleotides. As used herein, an antisense sense strand, wherein at least 90% of the nucleotides present are modified nucleotides, is an antisense strand having two or fewer (i.e., 0, 1, or 2) nucleotides in the sense strand being ribonucleotides. In some embodiments, one or more nucleotides of an RNAi agent is a ribonucleotide.

### Modified Internucleoside Linkages

[0119] In some embodiments, one or more nucleotides of the first or the second RNAi agent are linked by non-standard linkages or backbones (i.e., modified internucleoside linkages or modified backbones). In some embodiments, a modified internucleoside linkage is a non-phosphate-containing covalent internucleoside linkage. Modified internucleoside linkages or backbones include, but are not limited to, 5′-phosphorothioate groups (represented herein as a lower case “s”), chiral phosphorothioates, thiophosphates, phosphorodithioates, phosphotriesters, aminoalkyl-phosphotriesters, alkyl phosphonates (e.g., methyl phosphonates or 3′-alkylene phosphonates), chiral phosphonates, phosphinates, phosphoramidates (e.g., 3′-amino phosphoramidate, aminoalkylphosphoramidates, or thionophosphoramidates), thionoalkyl-phosphonates, thionoalkylphosphotriesters, morpholino linkages, boranophosphates having normal 3′-5′ linkages, 2′-5′ linked analogs of boranophosphates, or boranophosphates having inverted polarity wherein the adjacent pairs of nucleoside units are linked 3′-5′ to 5′-3′ or 2′-5′ to 5′-2′. In some embodiments, a modified internucleoside linkage or backbone lacks a phosphorus atom. Modified internucleoside linkages lacking a phosphorus atom include, but are not limited to, short chain alkyl or cycloalkyl inter-sugar linkages, mixed heteroatom and alkyl or cycloalkyl inter-sugar linkages, or one or more short chain heteroatomic or heterocyclic inter-sugar linkages. In some embodiments, modified internucleoside backbones include, but are not limited to, siloxane backbones, sulfide backbones, sulfoxide backbones, sulfone backbones, formacetyl and thioformacetyl backbones, methylene formacetyl and thioformacetyl backbones, alkene-containing backbones, sulfamate backbones, methyleneimino and methylenehydrazino backbones, sulfonate and sulfonamide backbones, amide backbones, and other backbones having mixed N, O, S, and CH₂ components.

[0120] In some embodiments, a sense strand of the first or the second RNAi agent can contain 1, 2, 3, 4, 5, or 6 phosphorothioate linkages, an antisense strand of the first or the second RNAi agent can contain 1, 2, 3, 4, 5, or 6 phosphorothioate linkages, or both the sense strand and the antisense strand independently can contain 1, 2, 3, 4, 5, or 6 phosphorothioate linkages. In some embodiments, a sense strand of the first or the second RNAi agent can contain 1, 2, 3, or 4 phosphorothioate linkages, an antisense strand of the first or the second RNAi agent can contain 1, 2, 3, or 4 phosphorothioate linkages, or both the sense strand and the antisense strand independently can contain 1, 2, 3, or 4 phosphorothioate linkages.

[0121] In some embodiments, the first or the second RNAi agent sense strand contains at least two phosphorothioate internucleoside linkages. In some embodiments, the at least two phosphorothioate internucleoside linkages are between the nucleotides at positions 1-3 from the 3′ end of the sense strand. In some embodiments, the at least two phosphorothioate internucleoside linkages are between the nucleotides at positions 1-3, 2-4, 3-5, 4-6, 4-5, or 6-8 from the 5′ end of the sense strand. In some embodiments, the first or the second RNAi agent antisense strand contains four phosphorothioate internucleoside linkages. In some embodiments, the four phosphorothioate internucleoside linkages are between the nucleotides at positions 1-3 from the 5′ end of the sense strand and between the nucleotides at positions 19-21, 20-22, 21-23, 22-24, 23-25, or 24-26 from the 5′ end. In some embodiments, the first or the second RNAi agent contains at least two phosphorothioate internucleoside linkages in the sense strand and three or four phosphorothioate internucleoside linkages in the antisense strand.

[0122] In some embodiments, the first or the second RNAi agent contains one or more modified nucleotides and one or more modified internucleoside linkages. In some embodiments, a 2′-modified nucleoside is combined with modified internucleoside linkage.

[0123] In some embodiments, the modified antisense strand sequences comprising the RNAi component has one of the sequences shown in Table 3. Table 3 shows the modified sequence of the antisense strands as well as their underlying unmodified sequences. In some embodiments, the modified sense strand sequences comprising the RNAi component has one of the sequences shown in Table 4. Table 4 shows the modified sequence of the sense strands as well as their underlying unmodified sequences.

TABLE 3
Antisense Strand Sequences.

| | | SEQ | | SEQ |
|---|---|---|---|---|
| AS Strand | | ID | | ID |
| ID | Modified sequence (5′→3′) | NO. | Unmodified sequence (5′→3′) | NO. |
| AM03508- | usAfscCfaAfuUfuAfuGfcCfuAfcAfg | 61 | UACCAAUUUAUGCCUACAG | 149 |
| AS | GfccsusuAu | | GCCUUAU | |
| AM04441- | usAfscCfaAfuUfuAfuGfcCfuAfcAfg | 62 | UACCAAUUUAUGCCUACAG | 150 |
| AS | Gfcscsu | | GCCU | |
| AM04442- | usAfscsCfaAfuUfuAfuGfcCfuAfcAf | 63 | UACCAAUUUAUGCCUACAG | 150 |
| AS | gGfccsu | | GCCU | |
| AM04443- | usAfscsCfaAfuUfuAfuGfcCfuAfcAf | 64 | UACCAAUUUAUGCCUACAG | 151 |
| AS | gGfsc | | GC | |
| AM04661- | usGfsugaAfgCfGfaaguGfcAfcacsusu | 65 | UGUGAAGCGAAGUGCACAC | 152 |
| AS | | | UU | |
| AM04768- | usAfscCfaAfuUfuAfuGfcCfuAfcAfg | 66 | UACCAAUUUAUGCCUACAG | 153 |
| AS | Cfcsusccgc | | CCUCCGC | |
| AM04769- | vpusAfscCfaAfuUfuAfuGfcCfuAfcA | 67 | UACCAAUUUAUGCCUACAG | 153 |
| AS | fgCfcsusccgc | | CCUCCGC | |
| AM05011- | usAfscsCfaAfuUfuAfuGfcCfuAfcAf | 68 | UACCAAUUUAUGCCUACAG | 154 |
| AS | gusu | | UU | |
| AM05012- | usAfscsCfaAfuUfuAfuGfcCfuAfcAf | 69 | UACCAAUUUAUGCCUACAG | 151 |
| AS | ggsc | | GC | |
| AM05013- | vpusAfscsCfaAfuUfuAfuGfcCfuAfc | 70 | UACCAAUUUAUGCCUACAG | 151 |
| AS | AfgGfsc | | GC | |
| AM05014- | vpusAfscsCfaAfuUfuAfuGfcCfuAfc | 71 | UACCAAUUUAUGCCUACAG | 154 |
| AS | Afgusu | | UU | |
| AM05052- | asUfsusGfaGfaGfaAfgUfcCfaCfcAfc | 72 | AUUGAGAGAAGUCCACCAC | 155 |
| AS | Gfsa | | GA | |
| AM05053- | asUfsusGfaGfaGfaAfgUfcCfaCfcAfc | 73 | AUUGAGAGAAGUCCACCAC | 155 |
| AS | gsa | | GA | |
| AM05054- | asUfsusGfaGfaGfaAfgUfcCfaCfcAfc | 74 | AUUGAGAGAAGUCCACCAC | 156 |
| AS | usu | | UU | |
| AM05055- | vpusUfsusGfaGfaGfaAfgUfcCfaCfc | 75 | UUUGAGAGAAGUCCACCAC | 157 |
| AS | AfcGfsa | | GA | |
| AM05056- | asAfsusUfgAfgAfgAfaGfuCfcAfcCf | 76 | AAUUGAGAGAAGUCCACCA | 158 |
| AS | aCfsg | | CG | |
| AM05057- | asAfsusUfgAfgAfgAfaGfuCfcAfcCf | 77 | AAUUGAGAGAAGUCCACCA | 158 |
| AS | acsg | | CG | |
| AM05058- | asAfsusUfgAfgAfgAfaGfuCfcAfcCf | 78 | AAUUGAGAGAAGUCCACCA | 159 |
| AS | ausu | | UU | |
| AM05060- | vpusAfsusUfgAfgAfgAfaGfuCfcAfc | 79 | UAUUGAGAGAAGUCCACCA | 160 |
| AS | CfaCfsg | | CG | |
| AM05351- | usAfscsCfaAfuUfuAfuGfcCfuAfcAf | 80 | UACCAAUUUAUGCCUACAG | 161 |
| AS | gGfsu | | GU | |
| AM05608- | usAfscCfaAfuUfuAfuGfcCfuAfcAfg | 81 | UACCAAUUUAUGCCUACAG | 154 |
| AS | susu | | UU | |
| AM05609- | usAfscsCfaAfuUfuAfuGfcCfuAfcAf | 82 | UACCAAUUUAUGCCUACAG | 162 |
| AS | gcsc | | CC | |
| AM05610- | usAfscsCfaAfuUfuAfuGfcCfuAfcAf | 83 | UACCAAUUUAUGCCUACAG | 163 |
| AS | gccusu | | CCUU | |
| AM05611- | usAfscsCfaAfuUfuAfuGfcCfuAfcAf | 84 | UACCAAUUUAUGCCUACAG | 164 |
| AS | gccusc | | CCUC | |
| AM05612- | usAfscscaauUfuAfuGfcCfuacagcsc | 85 | UACCAAUUUAUGCCUACAG | 162 |
| AS | | | CC | |
| AM05613- | usAfscscaauUfuAfuGfcCfuacagccus | 86 | UACCAAUUUAUGCCUACAG | 163 |
| AS | u | | CCUU | |
| AM05614- | usAfscscaauUfuAfuGfcCfuacagccus | 87 | UACCAAUUUAUGCCUACAG | 164 |
| AS | c | | CCUC | |
| AM05618- | asUfsusgagaGfaAfgUfcCfaccacusu | 88 | AUUGAGAGAAGUCCACCAC | 156 |
| AS | | | UU | |
| AM05621- | usUfsusGfaGfaGfaAfgUfcCfaCfcAf | 89 | UUUGAGAGAAGUCCACCAC | 165 |
| AS | cusu | | UU | |
| AM05623- | asUfsusGfaGfaGfaAfgUfcCfaCfcAfc | 90 | AUUGAGAGAAGUCCACCAC | 166 |
| AS | ggusu | | GGUU | |
| AM05626- | asUfsusgagaGfaAfgUfcCfaccacggus | 91 | AUUGAGAGAAGUCCACCAC | 166 |
| AS | u | | GGUU | |
| AM05628- | asUfsusGfaGfaGfaAfgUfcCfaCfcAfc | 92 | AUUGAGAGAAGUCCACCAC | 167 |
| AS | gagsu | | GAGU | |
| AM05631- | usAfsusUfgAfgAfgAfaGfuCfcAfcCf | 93 | UAUUGAGAGAAGUCCACCA | 160 |
| AS | aCfsg | | CG | |
| AM05632- | usAfsusugagAfgAfaGfuCfcaccacsg | 94 | UAUUGAGAGAAGUCCACCA | 160 |
| AS | | | CG | |
| AM05633- | usAfsusUfgAfgAfgAfaGfuCfcAfcCf | 95 | UAUUGAGAGAAGUCCACCA | 168 |
| AS | aCfgusu | | CGUU | |
| AM05634- | usAfsusugagAfgAfaGfuCfcaccacgas | 96 | UAUUGAGAGAAGUCCACCA | 169 |
| AS | g | | CGAG | |
| AM05635- | usAfsusUfgAfgAfgAfaGfuCfcAfcCf | 97 | UAUUGAGAGAAGUCCACCA | 169 |
| AS | aCfgasg | | CGAG | |
| AM05637- | usAfsusUfgAfgAfgAfaGfuCfcAfcCf | 98 | UAUUGAGAGAAGUCCACCA | 170 |
| AS | aCfgsa | | CGA | |
| AM05638- | usAfsusugagAfgAfaGfuCfcaccacgsa | 99 | UAUUGAGAGAAGUCCACCA | 170 |
| AS | | | CGA | |
| AM05747- | asGfsasAfaAfuugagAfgAfaGfuCfcA | 100 | AGAAAAUUGAGAGAAGUC | 171 |
| AS | fsc | | CAC | |
| AM05849- | usAfscsCfaAfuuuauGfcCfuAfcAfgus | 101 | UACCAAUUUAUGCCUACAG5 | 154 |
| AS | u | | UU | |
| AM05850- | usAfscsCfaAfuuuauGfcCfuAfcAfgcs | 102 | UACCAAUUUAUGCCUACAG | 162 |
| AS | c | | CC | |
| AM05851- | usAfscsCfaAfuuuauGfcCfuAfcAfgcu | 103 | UACCAAUUUAUGCCUACAG | 172 |
| AS | su | | CUU | |
| AM05852- | usAfscsCfaAfuuuauGfcCfuAfcAfgcc | 104 | UACCAAUUUAUGCCUACAG | 173 |
| AS | su | | CCU | |
| AM05853- | usAfscsCfaAfuuuauGfcCfuAfcAfgcc | 105 | UACCAAUUUAUGCCUACAG | 163 |
| AS | usu | | CCUU | |
| AM05854- | usAfscsCfaAfuuuauGfcCfuAfcAfgcc | 106 | UACCAAUUUAUGCCUACAG | 164 |
| AS | usc | | CCUC | |
| AM05855- | cPrpusAfscsCfaAfuUfuAfuGfcCfuA | 107 | UACCAAUUUAUGCCUACAG | 154 |
| AS | fcAfgusu | | UU | |
| AM05860- | cPrpusAfsusUfgAfgAfgAfaGfuCfcA | 108 | UAUUGAGAGAAGUCCACCA | 160 |
| AS | fcCfaCfsg | | CG | |
| AM05862- | usAfsusUfgAfgagaaGfuCfcAfcCfaus | 109 | UAUUGAGAGAAGUCCACCA | 174 |
| AS | u | | UU | |
| AM05863- | usAfsusUfgAfgagaaGfuCfcAfcCfacs | 110 | UAUUGAGAGAAGUCCACCA | 160 |
| AS | g | | CG | |
| AM05864- | usAfsusUfgAfgagaaGfuCfcAfcCfacs | 111 | UAUUGAGAGAAGUCCACCA | 175 |
| AS | usu | | CUU | |
| AM05865- | usAfsusUfgAfgagaaGfuCfcAfcCfacs | 112 | UAUUGAGAGAAGUCCACCA | 170 |
| AS | gsa | | CGA | |
| AM05867- | vpusAfsusUfgAfgagaaGfuCfcAfcCfa | 113 | UAUUGAGAGAAGUCCACCA | 160 |
| AS | Cfsg | | CG | |
| AM05873- | usUfsusGfaGfagaagUfcCfaCfcAfcus | 114 | UUUGAGAGAAGUCCACCAC | 165 |
| AS | u | | UU | |
| AM05874- | usUfsusGfaGfagaagUfcCfaCfcAfcgs | 115 | UUUGAGAGAAGUCCACCAC | 157 |
| AS | a | | GA | |
| AM05875- | usUfsusGfaGfagaagUfcCfaCfcAfcgu | 116 | UUUGAGAGAAGUCCACCAC | 176 |
| AS | su | | GUU | |
| AM05876- | usUfsusGfaGfagaagUfcCfaCfcAfcga | 117 | UUUGAGAGAAGUCCACCAC | 177 |
| AS | sg | | GAG | |
| AM05877- | cPrpusUfsusGfaGfaGfaAfgUfcCfaCf | 118 | UUUGAGAGAAGUCCACCAC | 165 |
| AS | cAfcusu | | UU | |
| AM06074- | cPrpusAfsusUfgAfgagaaGfuCfcAfc | 119 | UAUUGAGAGAAGUCCACCA | 175 |
| AS | Cfacsusu | | CUU | |
| AM06142- | usAfsusUfgAfgagaaGfuCfcAfcCfacu | 120 | UAUUGAGAGAAGUCCACCA | 175 |
| AS | su | | CUU | |
| AM06143- | usAfsusUfgAfgagaaGfuCfcAfcCfacg | 121 | UAUUGAGAGAAGUCCACCA | 168 |
| AS | usu | | CGUU | |
| AM06144- | usAfsusUfgAfgagaaGfuCfcAfcCfacu | 122 | UAUUGAGAGAAGUCCACCA | 175 |
| AS | us(invAb) | | CUU | |
| AM06145- | usAfsusUfgAfgagaaGfuCfcAfcCfacg | 123 | UAUUGAGAGAAGUCCACCA | 169 |
| AS | asg | | CGAG | |
| AM06222- | usAfsusUfgAfgAfgAfaGfuCfcAfcCf | 124 | UAUUGAGAGAAGUCCACCA | 175 |
| AS | acusu | | CUU | |
| AM06281- | asGfsasAfaAfuUfgAfgAfgAfaGfuCf | 125 | AGAAAAUUGAGAGAAGUC | 178 |
| AS | cusu | | CUU | |
| AM06282- | asGfsasAfaAfuUfgAfgAfgAfaGfuCf | 126 | AGAAAAUUGAGAGAAGUC | 171 |
| AS | casc | | CAC | |
| AM06283- | asGfsasAfaAfuUfgAfgAfgAfaGfuCf | 127 | AGAAAAUUGAGAGAAGUC | 179 |
| AS | cacusu | | CACUU | |
| AM06284- | asGfsasAfaAfuUfgAfgAfgAfaGfuCf | 128 | AGAAAAUUGAGAGAAGUC | 180 |
| AS | cacsc | | CACC | |
| AM06285- | usGfsasAfaAfuUfgAfgAfgAfaGfuCf | 129 | UGAAAAUUGAGAGAAGUC | 325 |
| AS | cusu | | CUU | |
| AM06286- | usGfsasAfaAfuUfgAfgAfgAfaGfuCf | 130 | UGAAAAUUGAGAGAAGUC | 181 |
| AS | casc | | CAC | |
| AM06299- | asCfscsAfaUfuUfaUfgCfcUfaCfaGfc | 131 | ACCAAUUUAUGCCUACAGC | 182 |
| AS | usu | | UU | |
| AM06300- | asCfscsAfaUfuUfaUfgCfcUfaCfaGfc | 132 | ACCAAUUUAUGCCUACAGC | 183 |
| AS | cusu | | CUU | |
| AM06301- | asCfscsAfaUfuUfaUfgCfcUfaCfaGfc | 133 | ACCAAUUUAUGCCUACAGC | 184 |
| AS | cusc | | CUC | |
| AM06302- | usCfscsAfaUfuUfaUfgCfcUfaCfaGfc | 134 | UCCAAUUUAUGCCUACAGC | 185 |
| AS | usu | | UU | |
| AM06303- | usCfscsAfaUfuUfaUfgCfcUfaCfaGfc | 135 | UCCAAUUUAUGCCUACAGC | 186 |
| AS | cusu | | CUU | |
| AM06463- | cPrpusAfscsCfaAfuUfuAfuGfcCfuA | 136 | UACCAAUUUAUGCCUACAG | 162 |
| AS | fcAfgcsc | | CC | |
| AM06464- | usAfscsCfaAfuUfuAfuGfcCfuAfcAf | 137 | UACCAAUUUAUGCCUACAG | 162 |
| AS | gscsc | | CC | |
| AM06465- | cPrpusAfscsCfaAfuUfuAfuGfcCfuA | 138 | UACCAAUUUAUGCCUACAG | 162 |
| AS | fcAfgscsc | | CC | |
| AM06604- | usAfscsCfaAfuUfuAfuGfcCfuAfcAf | 139 | UACCAAUUUAUGCCUACAG | 187 |
| AS | gcsu | | CU | |
| AM06606- | usAfscsCfaAfuUfuAfuGfcCfuAfcAf | 140 | UACCAAUUUAUGCCUACAG | 188 |
| AS | gcsg | | CG | |
| AM06608- | asAfscsCfaAfuUfuAfuGfcCfuAfcAf | 141 | AACCAAUUUAUGCCUACAG | 189 |
| AS | gcsc | | CC | |
| AM06611- | usAfscsCfaAfuUfUfAfuGfcCfuAfcA | 142 | UACCAAUUUAUGCCUACAG | 154 |
| AS | fgusu | | UU | |
| AM06612- | usAfscsCfaAfuUfuAfuGfcCfuAfcAf | 143 | UACCAAUUUAUGCCUACAG | 162 |
| AS | gCfsc | | CC | |
| AM06614- | asCfscAfaUfuUfaUfgCfcUfaCfaGfc | 144 | ACCAAUUUAUGCCUACAGC | 190 |
| AS | Cfsu | | CU | |
| AM06616- | usCfscAfaUfuUfaUfgCfcUfaCfaGfc | 145 | UCCAAUUUAUGCCUACAGC | 191 |
| AS | Cfsu | | CU | |
| AM06618- | asCfscAfaUfuUfaUfgCfcUfaCfaGfcc | 146 | ACCAAUUUAUGCCUACAGC | 192 |
| AS | sg | | CG | |
| AM06620- | usCfscAfaUfuUfaUfgCfcUfaCfaGfc | 147 | UCCAAUUUAUGCCUACAGC | 193 |
| AS | csg | | CG | |
| AM06751- | usAfscsCfaAfuUfuAfuGfcCfuAfcAf | 148 | UACCAAUUUAUGCCUACAG | 194 |
| AS | ggsg | | GG | |

TABLE 4
Sense Strand Sequences.

| | | SEQ | | SEQ |
|---|---|---|---|---|
| Strand | | ID | | ID |
| ID | Modified sequence (5′→3′) | NO: | (Unmodified sequence (5′→3′) | NO: |
| AM04444- | (NAG25)uusgsccuguagGfCfAfuaaauugg | 195 | UUGCCUGUAGGCAUAA | 268 |
| SS | uaus(invdT) | | AUUGGUAUT | |
| AM04445- | (NAG25)uauausgsccuguagGfCfAfuaaauu | 196 | UAUAUGCCUGUAGGCA | 269 |
| SS | ggu(invdA) | | UAAAUUGGUA | |
| AM04767- | (NAG25)gcggagsgcuguagGfCfAfuaaauu | 197 | GCGGAGGCUGUAGGCA | 270 |
| SS | ggTM(invdA) | | UAAAUUGGTA | |
| AM05010- | (NAG25)scsuguagGfCfAfuaaauugguauu | 198 | CUGUAGGCAUAAAUU | 271 |
| SS | s(invAb) | | GGUAUU | |
| AM05015- | (NAG25)sgsccuguagGfCfAfuaaauugguas | 199 | GCCUGUAGGCAUAAAU | 272 |
| SS | (invAb) | | UGGUA | |
| AM05016- | (NAG25)sgsccuguagGfCfAfuaaauuggus | 200 | GCCUGUAGGCAUAAAU | 272 |
| SS | (invdA) | | UGGUA | |
| AM05017- | (NAG25)sgsccuguagGfCfAfuaaauugguA | 201 | GCCUGUAGGCAUAAAU | 272 |
| SS | Ms(invAb) | | UGGUA | |
| AM05018- | (NAG25)sgsccuguagGfCfAfuaaauuggT | 202 | GCCUGUAGGCAUAAAU | 273 |
| SS | MAMs(invAb) | | UGGTA | |
| AM05019- | (NAG25)sasacuguagGfCfAfuaaauugguas | 203 | AACUGUAGGCAUAAA | 274 |
| SS | (invAb) | | UUGGUA | |
| AM05034- | (NAG25)suscguggugGfAfCfuucucucaau | 204 | UCGUGGUGGACUUCUC | 275 |
| SS | s(invAb) | | UCAAU | |
| AM05046- | (NAG25)sasaguggugGfAfCfuucucucaaus | 205 | AAGUGGUGGACUUCUC | 276 |
| SS | (invAb) | | UCAAU | |
| AM05047- | (NAG25)suscguggugGfAfCfuucucucaA | 206 | UCGUGGUGGACUUCUC | 277 |
| SS | MTMs(invAb) | | UCAAT | |
| AM05048- | (NAG25)scsgugguggAfCfUfucucucaauu | 207 | CGUGGUGGACUUCUCU | 278 |
| SS | s(invAb) | | CAAUU | |
| AM05049- | (NAG25)sasaugguggAfCfUfucucucaauus | 208 | AAUGGUGGACUUCUCU | 279 |
| SS | (invAb) | | CAAUU | |
| AM05050- | (NAG25)scsgugguggAfCfUfucucucaaT | 209 | CGUGGUGGACUUCUCU | 280 |
| SS | MTMs(invAb) | | CAATT | |
| AM05051- | (NAG25)sgsgacuucuCfUfCfaauuuucuaas | 210 | GGACUUCUCUCAAUUU | 281 |
| SS | (invAb) | | UCUAA | |
| AM05063- | (NAG25)scsgugguggAfCfUfucucucaauas | 211 | CGUGGUGGACUUCUCU | 282 |
| SS | (invAb) | | CAAUA | |
| AM05064- | (NAG25)suscguggugGfAfCfuucucucaaas | 212 | UCGUGGUGGACUUCUC | 283 |
| SS | (invAb) | | UCAAA | |
| AM05346- | (NAG31)sasccuguagGfCfAfuaaauugguas | 213 | ACCUGUAGGCAUAAAU | 284 |
| SS | (invAb) | | UGGUA | |
| AM05347- | (NAG31)s(invAb)scuguagGfCfAfuaaauu | 214 | CUGUAGGCAUAAAUU | 285 |
| SS | gguas(invAb) | | GGUA | |
| AM05606- | (NAG25)s(invAb)scuguagGfCfAfuaaauu | 215 | CUGUAGGCAUAAAUU | 285 |
| SS | gguas(invAb) | | GGUA | |
| AM05607- | (NAG37)s(invAb)scuguagGfCfAfuaaauu | 216 | CUGUAGGCAUAAAUU | 285 |
| SS | gguas(invAb) | | GGUA | |
| AM05615- | (NAG25)s(invAb)sacuguagGfCfAfuaaau | 217 | ACUGUAGGCAUAAAU | 286 |
| SS | ugguas(invAb) | | UGGUA | |
| AM05616- | (NAG25)sgsgcuguagGfCfAfuaaauuggua | 218 | GGCUGUAGGCAUAAA | 287 |
| SS | s(invAb) | | UUGGUA | |
| AM05617- | (NAG37)sasaguggugGfAfCfuucucucaaus | 219 | AAGUGGUGGACUUCUC | 276 |
| SS | (invAb) | | UCAAU | |
| AM05620- | (NAG25)sasaguggugGfAfCfuucucucaaas | 220 | AAGUGGUGGACUUCUC | 288 |
| SS | (invAb) | | UCAAA | |
| AM05622- | (NAG25)scscguggugGfAfCfuucucucaaus | 221 | CCGUGGUGGACUUCUC | 289 |
| SS | (invAb) | | UCAAU | |
| AM05624- | (NAG25)s(invAb)sccguggugGfAfCfuucu | 222 | CCGUGGUGGACUUCUC | 289 |
| SS | cucaaus(invAb) | | UCAAU | |
| AM05627- | (NAG25)scsucguggugGfAfCfuucucucaa | 223 | CUCGUGGUGGACUUCU | 290 |
| SS | us(invAb) | | CUCAAU | |
| AM05629- | (NAG25)s(invAb)sguggugGfAfCfuucuc | 224 | GUGGUGGACUUCUCUC | 291 |
| SS | ucaaus(invAb) | | AAU | |
| AM05630- | (NAG25)s(invAb)sguggugGfAfCfuucuc | 225 | GUGGUGGACUUCUCUC | 292 |
| SS | ucaauusu(invAb) | | AAUUU | |
| AM05636- | (NAG25)suscgugguggAfCfUfucucucaau | 226 | UCGUGGUGGACUUCUC | 293 |
| SS | us(invAb) | | UCAAUU | |
| AM05639- | (NAG25)s(invAb)sugguggAfCfUfucucuc | 227 | UGGUGGACUUCUCUCA | 294 |
| SS | aauus(invAb) | | AUU | |
| AM05640- | (NAG37)s(invAb)sugguggAfCfUfucucuc | 228 | UGGUGGACUUCUCUCA | 294 |
| SS | aauus(invAb) | | AUU | |
| AM05746- | (NAG25)sgsuggacuuCfUfCfucaauuuucus | 10 | GUGGACUUCUCUCAAU | 14 |
| SS | (invAb) | | UUUCU | |
| AM05856- | (NAG25)s(invAb)scuguagGfCfAfuaaauu | 229 | CUGUAGGCAUAAAUU | 271 |
| SS | gguausu(invAb) | | GGUAUU | |
| AM05857- | (NAG25)s(invAb)sgcuguagGfCfAfuaaau | 230 | GCUGUAGGCAUAAAU | 295 |
| SS | ugguausu(invAb) | | UGGUAUU | |
| AM05858- | (NAG25)s(invAb)sggcuguagGfCfAfuaaa | 231 | GGCUGUAGGCAUAAA | 296 |
| SS | uugguausu(invAb) | | UUGGUAUU | |
| AM05859- | (NAG25)s(invAb)saacuguagGfCfAfuaaa | 232 | AACUGUAGGCAUAAA | 297 |
| SS | uugguausu(invAb) | | UUGGUAUU | |
| AM05868- | (NAG25)s(invAb)ugguggAfCfUfucucuc | 233 | UGGUGGACUUCUCUCA | 298 |
| SS | aauausu(invAb) | | AUAUU | |
| AM05869- | (NAG25)s(invAb)sgugguggAfCfUfucuc | 234 | GUGGUGGACUUCUCUC | 299 |
| SS | ucaauausu(invAb) | | AAUAUU | |
| AM05870- | (NAG25)sasaugguggAfCfUfucucucaauau | 235 | AAUGGUGGACUUCUCU | 300 |
| SS | su(invAb) | | CAAUAUU | |
| AM05871- | (NAG25)scsgugguggAfCfUfucucucaaua | 236 | CGUGGUGGACUUCUCU | 301 |
| SS | usu(invAb) | | CAAUAUU | |
| AM05872- | (NAG31)scsgugguggAfCfUfucucucaauas | 237 | CGUGGUGGACUUCUCU | 282 |
| SS | (invAb) | | CAAUA | |
| AM05879- | (NAG25)s(invAb)saaguggugGfAfCfuucu | 238 | AAGUGGUGGACUUCUC | 276 |
| SS | cucaaus(invAb) | | UCAAU | |
| AM05880- | (NAG25)s(invAb)sguggugGfAfCfuucuc | 239 | GUGGUGGACUUCUCUC | 302 |
| SS | ucaaausu(invAb) | | AAAUU | |
| AM05881- | (NAG25)s(invAb)scguggugGfAfCfuucuc | 240 | CGUGGUGGACUUCUCU | 303 |
| SS | ucaaausu(invAb) | | CAAAUU | |
| AM05882- | (NAG25)sasaguggugGfAfCfuucucucaaau | 241 | AAGUGGUGGACUUCUC | 304 |
| SS | su(invAb) | | UCAAAUU | |
| AM05883- | (NAG25)suscguggugGfAfCfuucucucaaa | 242 | UCGUGGUGGACUUCUC | 305 |
| SS | usu(invAb) | | UCAAAUU | |
| AM06146- | (NAG37)s(invAb)sgugguggAfCfUfucuc | 243 | GUGGUGGACUUCUCUC | 299 |
| SS | ucaauausu(invAb) | | AAUAUU | |
| AM06147- | (NAG37)s(invAb)scgugguggAfCfUfucuc | 244 | CGUGGUGGACUUCUCU | 301 |
| SS | ucaauausu(invAb) | | CAAUAUU | |
| AM06148- | (NAG37)s(invAb)scucgugguggAfCfUfuc | 245 | CUCGUGGUGGACUUCU | 306 |
| SS | ucucaauas(invAb) | | CUCAAUA | |
| AM06149- | (NAG37)s(invAb)scucgugguggAfCfUfuc | 246 | CUCGUGGUGGACUUCU | 307 |
| SS | ucucaauausu(invAb) | | CUCAAUAUU | |
| AM06150- | (NAG37)s(invAb)sggcuguagGfCfAfuaaa | 247 | GGCUGUAGGCAUAAA | 287 |
| SS | uugguas(invAb) | | UUGGUA | |
| AM06151- | (NAG37)s(invAb)sgaggcuguagGfCfAfua | 248 | GAGGCUGUAGGCAUA | 308 |
| SS | aauugguas(invAb) | | AAUUGGUA | |
| AM06152- | (NAG37)s(invAb)sgaggcuguagGfCfAfua | 249 | GAGGCUGUAGGCAUA | 309 |
| SS | aauugguausu(invAb) | | AAUUGGUAUU | |
| AM06287- | (NAG37)s(invAb)sggacuuCfUfCfucaauu | 250 | GGACUUCUCUCAAUUU | 310 |
| SS | uucus(invAb) | | UCU | |
| AM06288- | (NAG37)s(invAb)sguggacuuCfUfCfucaa | 11 | GUGGACUUCUCUCAAU | 14 |
| SS | uuuucus(invAb) | | UUUCU | |
| AM06289- | (NAG37)s(invAb)sgguggacuuCfUfCfuca | 12 | GGUGGACUUCUCUCAA | 15 |
| SS | auuuucus(invAb) | | UUUUCU | |
| AM06290- | (NAG37)s(invAb)sggacuuCfUfCfucaauu | 251 | GGACUUCUCUCAAUUU | 311 |
| SS | uucas(invAb) | | UCA | |
| AM06291- | (NAG37)s(invAb)sguggacuuCfUfCfucaa | 252 | GUGGACUUCUCUCAAU | 312 |
| SS | uuuucas(invAb) | | UUUCA | |
| AM06304- | (NAG37)s(invAb)sgcuguaGfGfCfauaaau | 253 | GCUGUAGGCAUAAAU | 313 |
| SS | uggus(invAb) | | UGGU | |
| AM06305- | (NAG37)s(invAb)sggcuguaGfGfCfauaaa | 254 | GGCUGUAGGCAUAAA | 314 |
| SS | uuggus(invAb) | | UUGGU | |
| AM06306- | (NAG37)s(invAb)sgaggcuguaGfGfCfaua | 255 | GAGGCUGUAGGCAUA | 315 |
| SS | aauuggus(invAb) | | AAUUGGU | |
| AM06307- | (NAG37)s(invAb)sgcuguaGfGfCfauaaau | 256 | GCUGUAGGCAUAAAU | 316 |
| SS | uggas(invAb) | | UGGA | |
| AM06308- | (NAG37)s(invAb)sggcuguaGfGfCfauaaa | 257 | GGCUGUAGGCAUAAA | 317 |
| SS | uuggas(invAb) | | UUGGA | |
| AM06603- | (NAG37)s(invAb)sagcuguagGfCfAfuaaa | 258 | AGCUGUAGGCAUAAA | 318 |
| SS | uugguas(invAb) | | UUGGUA | |
| AM06605- | (NAG37)s(invAb)scgcuguagGfCfAfuaaa | 16 | CGCUGUAGGCAUAAAU | 19 |
| SS | uugguas(invAb) | | UGGUA | |
| AM06607- | (NAG37)s(invAb)sggcuguagGfCfAfuaaa | 259 | GGCUGUAGGCAUAAA | 319 |
| SS | uugguus(invAb) | | UUGGUU | |
| AM06609- | (NAG37)s(invAb)scuguagGfCfAfuaaauu | 260 | CUGUAGGCAUAAAUU | 271 |
| SS | gguasuus(invAb) | | GGUAUU | |
| AM06610- | (NAG37)s(invAb)scuGfuAfgGfCfAfuAf | 261 | CUGUAGGCAUAAAUU | 271 |
| SS | aAfuUfgGfuasuus(invAb) | | GGUAUU | |
| AM06613- | (NAG37)s(invAb)saggcuguaGfGfCfauaa | 262 | AGGCUGUAGGCAUAA | 320 |
| SS | auuggus(invAb) | | AUUGGU | |
| AM06615- | (NAG37)s(invAb)saggcuguaGfGfCfauaa | 263 | AGGCUGUAGGCAUAA | 321 |
| SS | auuggas(invAb) | | AUUGGA | |
| AM06617- | (NAG37)s(invAb)scggcuguaGfGfCfauaa | 264 | CGGCUGUAGGCAUAAA | 322 |
| SS | auuggus(invAb) | | UUGGU | |
| AM06619- | (NAG37)s(invAb)scggcuguaGfGfCfauaa | 265 | CGGCUGUAGGCAUAAA | 323 |
| SS | auuggas(invAb) | | UUGGA | |
| AM06750- | (NAG37)s(invAb)scccuguagGfCfAfuaaa | 266 | CCCUGUAGGCAUAAAU | 324 |
| SS | uugguas(invAb) | | UGGUA | |
| AM06752- | (NAG37)csgcuguagGfCfAfuaaauugguas | 17 | CGCUGUAGGCAUAAAU | 19 |
| SS | (invAb) | | UGGUA | |
| AM06753- | (NAG37)csccuguagGfCfAfuaaauugguas | 267 | CCCUGUAGGCAUAAAU | 324 |
| SS | (invAb) | | UGGUA | |
| AM06776- | (NAG25)s(invAb)sguggacuuCfUfCfucaa | 13 | GUGGACUUCUCUCAAU | 14 |
| SS | uuuucus(invAb) | | UUUCU | |
| AM06777- | (NAG25)s(invAb)scgcuguagGfCfAfuaaa | 18 | CGCUGUAGGCAUAAAU | 19 |
| SS | uugguas(invAb) | | UGGUA | |

[0124] In some embodiments, the first and the second RNAi agents disclosed herein comprise any of the modified sequences in Table 5.

TABLE 5
Exemplary modified sequences for first and second RNAi agents

| Antisense | | Sense | |
|---|---|---|---|
| SEQ ID | | SEQ | |
| NO | Modified sequence (5′→3′) | ID NO | Modified sequence (5′→3′) |
| 1 | asGfsasAfaAfuugagAfgAfaGfuCfcA | 10 | (NAG25)sgsuggacuuCfUfCfucaauuuu |
| | fsc | | cus(invAb) |
| 1 | asGfsasAfaAfuugagAfgAfaGfuCfcA | 11 | (NAG37)s(invAb)sguggacuuCfUfCfu |
| | fsc | | caauuuucus(invAb) |
| 1 | asGfsasAfaAfuugagAfgAfaGfuCfcA | 13 | (NAG25)s(invAb)sguggacuuCfUfCfu |
| | fsc | | caauuuucus(invAb) |
| 2 | asGfsasAfaAfuUfgAfgAfgAfaGfuCf | 10 | (NAG25)sgsuggacuuCfUfCfucaauuuu |
| | casc | | cus(invAb) |
| 2 | asGfsasAfaAfuUfgAfgAfgAfaGfuCf | 11 | (NAG37)s(invAb)sguggacuuCfUfCfu |
| | casc | | caauuuucus(invAb) |
| 2 | asGfsasAfaAfuUfgAfgAfgAfaGfuCf | 13 | (NAG25)s(invAb)sguggacuuCfUfCfu |
| | casc | | caauuuucus(invAb) |
| 3 | asGfsasAfaAfuUfgAfgAfgAfaGfuCf | 10 | (NAG25)sgsuggacuuCfUfCfucaauuuu |
| | cacusu | | cus(invAb) |
| 3 | asGfsasAfaAfuUfgAfgAfgAfaGfuCf | 11 | (NAG37)s(invAb)sguggacuuCfUfCfu |
| | cacusu | | caauuuucus(invAb) |
| 3 | asGfsasAfaAfuUfgAfgAfgAfaGfuCf | 13 | (NAG25)s(invAb)sguggacuuCfUfCfu |
| | cacusu | | caauuuucus(invAb) |
| 4 | asGfsasAfaAfuUfgAfgAfgAfaGfuCf | 12 | (NAG37)s(invAb)sgguggacuuCfUfCf |
| | cacsc | | ucaauuuucus(invAb) |
| 8 | usAfscsCfaAfuUfuAfuGfcCfuAfcAf | 16 | (NAG37)s(invAb)scgcuguagGfCfAfu |
| | gcsg | | aaauugguas(invAb) |
| 8 | usAfscsCfaAfuUfuAfuGfcCfuAfcAf | 17 | (NAG37)csgcuguagGfCfAfuaaauugg |
| | gcsg | | uas(invAb) |
| 8 | usAfscsCfaAfuUfuAfuGfcCfuAfcAf | 18 | (NAG25)s(invAb)scgcuguagGfCfAfu |
| | gcsg | | aaauugguas(invAb) |

A = adenosine-3′-phosphate;
C = cytidine-3′-phosphate;
G = guanosine-3′-phosphate;
U = uridine-3′-phosphate
n = any 2′-OMe modified nucleotide
a = 2′-O-methyladenosine-3′-phosphate
as = 2′-O-methyladenosine-3′-phosphorothioate
c = 2′-O-methylcytidine-3′-phosphate
CS = 2′-O-methylcytidine-3′-phosphorothioate
g = 2′-O-methylguanosine-3′-phosphate
gs = 2′-O-methylguanosine-3′-phosphorothioate
t = 2′-O-methyl-5-methyluridine-3′-phosphate
ts = 2′-O-methyl-5-methyluridine-3′-phosphorothioate
u = 2′-O-methyluridine-3′-phosphate
us = 2′-O-methyluridine-3′-phosphorothioate
Nf = any 2′-fluoro modified nucleotide
Af = 2′-fluoroadenosine-3′-phosphate
Afs = 2′-fluoroadenosine-3′-phosporothioate
Cf = 2′-fluorocytidine-3′-phosphate
Cfs = 2′-fluorocytidine-3′-phosphorothioate
Gf = 2′-fluoroguanosine-3′-phosphate
Gfs = 2′-fluoroguanosine-3′-phosphorothioate
Tf = 2′-fluoro-5′-methyluridine-3′-phosphate
Tfs = 2′-fluoro-5′-methyluridine-3′-phosphorothioate
Uf = 2′-fluorouridine-3′-phosphate
Ufs = 2′-fluorouridine-3′-phosphorothioate
dN = any 2′-deoxyribonucleotide
dT = 2′-deoxythymidine-3′-phosphate
N_{UNA} = 2′,3′-seco nucleotide mimics (unlocked nucleobase analogs)
N_{LNA} = locked nucleotide
Nf_{ANA} = 2′-F-Arabino nucleotide
NM = 2′-methoxyethyl nucleotide
AM = 2′-methoxyethyladenosine-3′-phosphate
AMs = 2′-methoxyethyladenosine-3′-phosphorothioate
TM = 2′-methoxyethylthymidine-3′-phosphate
TMs = 2′-methoxyethylthymidine-3′-phosphorothioate
R = ribitol
(invdN) = any inverted deoxyribonucleotide (3′-3′ linked nucleotide)
(invAb) = inverted (3′-3′ linked) abasic deoxyribonucleotide
(invAb)s = inverted (3′-3′ linked) abasic deoxyribonucleotide-5′-
phosphorothioate
(invn) = any inverted 2′-OMe nucleotide (3′-3′ linked nucleotide)
s = phosphorothioate linkage

[0125] Notably, the sense strands in Tables 4 and 5 include a targeting group (NAG25, NAG25s, NAG 37, or NAG37s) at the 5′ end. It will be understood that the disclosure also includes sense strands that have sequences displayed in Tables 4 and 5 but without the targeting group on the 5′ end or with targeting groups other than NAG25, NAG25s, NAG37, or NAG37s, as disclosed herein. It will be further understood that both the antisense and/or sense strands displayed in Table 3 can be modified either at the 5′ end or 3′ end with a targeting group, as disclosed herein.

[0126] In some embodiments, the first RNAi agent comprises SEQ ID NO: 5 and SEQ ID NO: 14. In some embodiments, the first RNAi agent comprises SEQ ID NO: 6 and SEQ ID NO: 14. In some embodiments, the first RNAi agent comprises SEQ ID NO: 7 and SEQ ID NO: 15. In some embodiments, the first RNAi agent comprises SEQ ID NO: 1 and SEQ ID NO: 10, 11 or 13. In some embodiments, the first RNAi agent comprises SEQ ID NO: 2 and SEQ ID NO: 10, 11 or 13. In some embodiments, the first RNAi agent comprises SEQ ID NO: 3 and SEQ ID NO: 10, 11, or 13. In some embodiments, the first RNAi agent comprises SEQ ID NO: 4 and SEQ ID NO: 12. In some embodiments, the second RNAi agent comprises SEQ ID NO: 9 and SEQ ID NO: 19. In some embodiments, the second RNAi agent comprises SEQ ID NO: 8 and SEQ ID NO: 16, 17 or 18.

[0127] In some embodiments, the RNAi component comprises a first RNAi agent comprising SEQ ID NO: 5 and SEQ ID NO: 14 and a second RNAi agent comprising SEQ ID NO: 9 and SEQ ID NO: 19. In some embodiments, the RNAi component comprises a first RNAi agent comprising SEQ ID NO: 6 and SEQ ID NO: 14 and a second RNAi agent comprising SEQ ID NO: 9 and SEQ ID NO: 19. In some embodiments, the RNAi component comprises a first RNAi agent comprising SEQ ID NO: 7 and SEQ ID NO: 15 and a second RNAi agent comprising SEQ ID NO: 9 and SEQ ID NO: 19.

[0128] In some embodiments, the RNAi component comprises a first RNAi agent comprising SEQ ID NO: 1 and SEQ ID NO: 10, 11 or 13 and a second RNAi agent comprising SEQ ID NO: 8 and SEQ ID NO: 16, 17 or 18. In some embodiments, the RNAi component comprises a first RNAi agent comprising SEQ ID NO: 2 and SEQ ID NO: 10, 11 or 13 and a second RNAi agent comprising SEQ ID NO: 8 and SEQ ID NO: 16, 17 or 18. In some embodiments, the RNAi component comprises a first RNAi agent comprising SEQ ID NO: 3 and SEQ ID NO: 10, 11 or 13 and a second RNAi agent comprising SEQ ID NO: 8 and SEQ ID NO: 16, 17 or 18. In some embodiments, the RNAi component comprises a first RNAi agent comprising SEQ ID NO: 4 and SEQ ID NO: 12 and a second RNAi agent comprising SEQ ID NO: 8 and SEQ ID NO: 16, 17 or 18.

[0129] In some embodiments, the RNAi component comprises a first and a second RNAi agent in a molar ratio of about 1:1, 2:1, 3:1, 4:1 or 5:1. In some embodiments, the two HBV RNAi agents are administered in a molar ratio of about 2:1.

[0130] In some embodiments, the first and the second RNAi agents are each independently conjugated to (NAG37) s, the first RNAi agent comprises an antisense strand comprising SEQ ID NO: 2 and a sense strand comprising SEQ ID NO: 11, the second RNAi agent comprises an antisense strand comprising SEQ ID NO: 8 and a sense strand comprising SEQ ID NO: 16.

[0131] In some embodiments, one of the RNAi agents comprising the RNAi component has is represented by the following structure (antisense strand comprising SEQ ID NO: 8 and a sense strand comprising SEQ ID NO: 16), shown as the sodium salt:

[chemical structure]

[0132] In some embodiments, one of the RNAi agents comprising the RNAi component has is represented by the following structure (antisense strand comprising SEQ ID NO: 8 and a sense strand comprising SEQ ID NO: 18), shown as the sodium salt:

[chemical structure]

[0133] In some embodiments, one of the RNAi agents comprising the RNAi component has is represented by the following structure (antisense strand comprising SEQ ID NO: 8 and a sense strand comprising SEQ ID NO: 16), shown as the free acid:

[chemical structure]

[0134] In some embodiments, one of the RNAi agents comprising the RNAi component has is represented by the following structure (antisense strand comprising SEQ ID NO: 120 and a sense strand comprising SEQ ID NO: 234), shown as the sodium salt:

[chemical structure]

[chemical structure]

[0135] In some embodiments, one of the RNAi agents comprising the RNAi component has is represented by the following structure (antisense strand comprising SEQ ID NO: 3 and a sense strand comprising SEQ ID NO: 13), shown as the sodium salt:

[chemical structure]

[chemical structure]

[0136] In some embodiments, one of the RNAi agents comprising the RNAi component has is represented by the following structure (antisense strand comprising SEQ ID NO: 2 and a sense strand comprising SEQ ID NO: 11), shown as the free acid:

[chemical structure]

[0137] In some embodiments, one of the RNAi agents comprising the RNAi component has is represented by the following structure (antisense strand comprising SEQ ID NO: 2 and a sense strand comprising SEQ ID NO: 13), shown as the free acid:

[chemical structure]

[0138] In some embodiments, one of the RNAi agents comprising the RNAi component has is represented by the following structure (antisense strand comprising SEQ ID NO: 2 and a sense strand comprising SEQ ID NO: 11), shown as the free acid:

[chemical structure]

[0139] The combinations described herein can be used in any methods or kits described below.

### Compositions and Administrations

[0140] Also provided herein is one or more compositions comprising an RNAi component.

[0141] As appropriate compositions there can be cited all compositions usually employed for systemically administering drugs. To prepare the pharmaceutical compositions of this invention, an effective amount of the particular compound, optionally in addition salt form, as the active ingredient is combined in intimate admixture with a pharmaceutically acceptable carrier, which carrier may take a wide variety of forms depending on the form of preparation desired for administration. These pharmaceutical compositions are desirable in unitary dosage form suitable, particularly, for administration orally, rectally, percutaneously, or by parenteral injection. For example, in preparing the compositions in oral dosage form, any of the usual pharmaceutical media may be employed such as, for example, water, glycols, oils, alcohols and the like in the case of oral liquid preparations such as suspensions, syrups, elixirs, emulsions and solutions; or solid carriers such as starches, sugars, kaolin, lubricants, binders, disintegrating agents and the like in the case of powders, pills, capsules, and tablets. Because of their case in administration, tablets and capsules represent the most advantageous oral dosage unit forms, in which case solid pharmaceutical carriers are employed. For parenteral compositions, the carrier will usually comprise sterile water, at least in large part, though other ingredients, for example, to aid solubility, may be included. Injectable solutions, for example, may be prepared in which the carrier comprises saline solution, glucose solution or a mixture of saline and glucose solution. Injectable suspensions may also be prepared in which case appropriate liquid carriers, suspending agents and the like may be employed. Also included are solid form preparations intended to be converted, shortly before use, to liquid form preparations. In the compositions suitable for percutaneous administration, the carrier optionally comprises a penetration enhancing agent and/or a suitable wetting agent, optionally combined with suitable additives of any nature in minor proportions, which additives do not introduce a significant deleterious effect on the skin. The compounds of the present invention may also be administered via oral inhalation or insufflation in the form of a solution, a suspension or a dry powder using any art-known delivery system.

[0142] It is especially advantageous to formulate the aforementioned pharmaceutical compositions in unit dosage form for case of administration and uniformity of dosage. Unit dosage form as used herein refers to physically discrete units suitable as unitary dosages, each unit containing a predetermined quantity of active ingredient calculated to produce the desired therapeutic effect in association with the required pharmaceutical carrier. Examples of such unit dosage forms are tablets (including scored or coated tablets), capsules, pills, suppositories, powder packets, wafers, injectable solutions or suspensions and the like, and segregated multiples thereof.

[0143] The first and second RNAi agents of an RNAi component that targets or reduces HBsAg can be formulated in the same or separate pharmaceutical compositions. The HBV RNAi agents in the same or separate compositions can be formulated with the same or different excipients and carriers. The HBV RNAi agents in the same or separate compositions can be administered through same or different administration routes.

[0144] Any suitable pharmaceutical composition comprising the first and/or second RNAi agents of the RNAi component and a pharmaceutically acceptable carrier can be used in the present invention in view of the present disclosure. The pharmaceutical composition can comprise any RNAi component described herein or otherwise known in the art. One or more pharmaceutically acceptable excipients (including vehicles, carriers, diluents, and/or delivery polymers) can be mixed with the first and/or second RNAi agents of the RNAi component, thereby forming a pharmaceutical formulation suitable for in vivo delivery to a human.

[0145] The HBV RNAi agents disclosed herein can be administered via any suitable parenteral route in a pharmaceutical composition appropriately tailored to the particular route. Thus, herein described pharmaceutical compositions can be administered by injection, for example, intravenously, intramuscularly, subcutaneously, or intraperitoneally. In some embodiments, there herein described pharmaceutical compositions are preferably via subcutaneous injection.

[0146] The pharmaceutical compositions including an HBV RNAi agent described herein can be delivered to a cell, group of cells, tumor, tissue, or subject using oligonucleotide delivery technologies known in the art. In general, any suitable method recognized in the art for delivering a nucleic acid molecule (in vitro or in vivo) can be adapted for use with a composition described herein. For example, a pharmaceutical composition comprising at least one of the first and second RNAi agents of an RNAi component described herein, can be delivered by systemic administration via a parenteral route, including subcutaneous, intravenous, intraperitoneal, and intramuscular administration. In certain embodiments, the compositions are administered by subcutaneous or intravenous infusion or injection.

[0147] As used herein, a pharmaceutical composition or medicament includes a pharmacologically effective amount of at least one of the described therapeutic compounds and a pharmaceutically acceptable carrier. The pharmaceutically acceptable carrier can comprise one or more pharmaceutically acceptable excipients. Pharmaceutically acceptable excipients, also referred to herein as “excipients”, are substances other than the active pharmaceutical ingredient that are intentionally included in the drug delivery system. Excipients do not exert or are not intended to exert a therapeutic effect at the intended dosage. Excipients can act to a) aid in processing of the drug delivery system during manufacture, b) protect, support or enhance stability, bioavailability or patient acceptability of the API, c) assist in product identification, and/or d) enhance any other attribute of the overall safety, effectiveness, of delivery of the API during storage or use. A pharmaceutically acceptable excipient may or may not be an inert substance.

[0148] Excipients include, but are not limited to: absorption enhancers, anti-adherents, anti-foaming agents, anti-oxidants, binders, buffering agents, carriers, coating agents, colors, delivery enhancers, delivery polymers, dextran, dextrose, diluents, emulsifiers, extenders, humectants, oils, polymers, preservatives, saline, salts, solvents, sugars, suspending agents, sustained release matrices, tonicity agents, and vehicles.

[0149] Pharmaceutical compositions suitable for injectable use include sterile aqueous solutions (where water soluble) or dispersions and sterile powders for the extemporaneous preparation of sterile injectable solutions or dispersion. For intravenous administration, suitable carriers include physiological saline, bacteriostatic water. Cremophor EL™ (BASF, Parsippany, NJ) or phosphate buffered saline. It should be stable under the conditions of manufacture and storage and should be preserved against the contaminating action of microorganisms such as bacteria and fungi. The carrier can be a solvent or dispersion medium containing, for example, water, ethanol, polyol (for example, glycerol, propylene glycol, and liquid polyethylene glycol), and suitable mixtures thereof. The proper fluidity can be maintained, for example, by the use of a coating such as lecithin, by the maintenance of the required particle size in the case of dispersion and by the use of surfactants. In many cases, it will be preferable to include isotonic agents, for example, sugars, polyalcohols such as mannitol, sorbitol, and sodium chloride in the composition. Prolonged absorption of the injectable compositions can be brought about by including in the composition an agent which delays absorption, for example, aluminum monostearate and gelatin.

[0150] Sterile injectable solutions can be prepared by incorporating the active compound in the required amount in an appropriate solvent with one or a combination of ingredients enumerated above, as required, followed by filter sterilization. Generally, dispersions are prepared by incorporating the active compound into a sterile vehicle which contains a basic dispersion medium and the required other ingredients from those enumerated above. In the case of sterile powders for the preparation of sterile injectable solutions, methods of preparation include vacuum drying and freeze-drying which yields a powder of the active ingredient plus any additional desired ingredient from a previously sterile-filtered solution thereof.

[0151] The active compounds can be prepared with carriers that will protect the compound against rapid elimination from the body, such as a controlled release formulation, including implants and microencapsulated delivery systems. Biodegradable, biocompatible polymers can be used, such as ethylene vinyl acetate, polyanhydrides, polyglycolic acid, collagen, polyorthoesters, and poly lactic acid. Methods for preparation of such formulations will be apparent to those skilled in the art. Liposomal suspensions can also be used as pharmaceutically acceptable carriers. These can be prepared according to methods known to those skilled in the art, for example, as described in U.S. Pat. No. 4,522,811.

[0152] The TLR8 agonist and/or HBV RNAi agents can be formulated in compositions in dosage unit form for case of administration and uniformity of dosage. Dosage unit form refers to physically discrete units suited as unitary dosages for the subject to be treated; each unit containing a predetermined quantity of active compound calculated to produce the desired therapeutic effect in association with the required pharmaceutical carrier. The specification for the dosage unit forms of the disclosure are dictated by and directly dependent on the unique characteristics of the active compound and the therapeutic effect to be achieved, and the limitations inherent in the art of compounding such an active compound for the treatment of individuals.

[0153] A pharmaceutical composition can contain other additional components commonly found in pharmaceutical compositions. Such additional components include, but are not limited to: anti-pruritics, astringents, local anaesthetics, or anti-inflammatory agents (e.g., antihistamine, diphenhydramine, etc.). It is also envisioned that cells, tissues or isolated organs that express or comprise the herein defined RNAi agents can be used as “pharmaceutical compositions.” As used herein. “pharmacologically effective amount,” “therapeutically effective amount,” or simply “effective amount” refers to that amount of a RNAi agent to produce a pharmacological, therapeutic or preventive result.

[0154] The amount administered will likely depend on such variables as the overall health status of the patient, the relative biological efficacy of the compound delivered, the formulation of the drug, the presence and types of excipients in the formulation, and the route of administration. Also, it is to be understood that the initial dosage administered can be increased beyond the above upper level in order to rapidly achieve the desired blood-level or tissue level, or the initial dosage can be smaller than the optimum.

[0155] For treatment of disease or for formation of a medicament or composition for treatment of a disease, the pharmaceutical compositions described herein including a HBV RNAi agent can be combined with an excipient or with a second therapeutic agent or treatment including, but not limited to: a second or other RNAi agent, a small molecule drug, an antibody, an antibody fragment, and/or a vaccine.

[0156] The described HBV RNAi agents, when added to pharmaceutically acceptable excipients and/or adjuvants, can be packaged into kits, containers, packs, or dispensers. The pharmaceutical compositions described herein can be packaged in pre-filled syringes or vials.

[0157] Participants are classified according to their renal function. The degree of renal impairment were based on CLCR as determined by CKD-EPI equation. Patients with normal renal function include having normal renal function defined an estimated glomerular filtration rate (eGFR) greater than or equal to (>=) 90 milliliter/minute/1.73 meter square (mL/min/1.73 m²). The patients must have stable renal function as defined as: (a) for participants with impaired renal function: <20 percent (%) change in serum creatinine concentrations between screening and Day −1; (b) for healthy participants: a change in serum creatinine concentration <0.2 milligram per decilitre (mg/dL) between screening and Day −1.

[0158] For patients with renal impairment, the patients have an impaired renal function based on eGFR as given below: (a) eGFR <90 to 60 mL/min/1.73 m² for participants in the mild renal impairment cohort; (b) eGFR 30 to 59 mL/min/1.73 m² for participants in the moderate impairment cohort; (c) eGFR <30 mL/min/1.73 m² for participants with ESRD requiring hemodialysis; concomitant medications to treat underlying disease states or medical conditions related to renal impairment are allowed. Participants must be on a stable dose of medication and/or treatment regimen for at least 2 months before dosing as well as during the study.

[0159] In some embodiments, the subject is affected with renal failure. In some embodiments, the subject has an estimated glomerular filtration rate (eGFR) greater than or equal to (>=) 90 milliliter/minute/1.73 meter square (mL/min/1.73 m²). In some embodiments, the subject has an estimated glomerular filtration rate (eGFR) of 60-90 mL/min/1.73 m². In some embodiments, the subject has an estimated glomerular filtration rate (eGFR) of 30-59 mL/min/1.73 m². In some embodiments, the subject has an estimated glomerular filtration rate (eGFR) of <30 mL/min/1.73 m². In some embodiments, the subject has an end stage renal disease

[0160] The application also provides methods of making compositions and therapeutic combinations of the application.

[0161] In another aspect, the kit further comprises a package insert including, without limitation, appropriate instructions for preparation and administration of the formulation, side effects of the formulation, and any other relevant information. The instructions can be in any suitable format, including, but not limited to, printed matter, videotape, computer readable disk, optical disc or directions to internet-based instructions.

[0162] In another aspect, kits for treating an individual who suffers from or is susceptible to the conditions described herein are provided, comprising a first container comprising a dosage amount of a composition or formulation as disclosed herein, and a package insert for use. The container can be any of those known in the art and appropriate for storage and delivery of intravenous formulation. In certain embodiments, the kit further comprises a second container comprising a pharmaceutically acceptable carrier, diluent, adjuvant, etc. for preparation of the formulation to be administered to the individual.

[0163] In another aspect, kits can also be provided that contain sufficient dosages of the compositions described herein (including pharmaceutical compositions thereof) to provide effective treatment for an individual for an extended period, such as 1-3 days, 1-5 days, a week, 2 weeks, 3, weeks, 4 weeks, 6 weeks, 8 weeks, 1 cycle, 2 cycles, 3 cycles, 4 cycles, 5 cycles, 6 cycles, 7 cycles, 8 cycles or more. In some embodiments, one cycle of treatment is about 1 month, about 2 months, about 3 months, about 4 months, about 5 months, about 6 months, about 7 months, about 8 months, about 9 months, about 10 months, about 11 months, about 12 months, about 15 months, about 18 months, about 21 months or about 24 months.

[0164] In some embodiments, the kits can also include multiple doses and may be packaged in quantities sufficient for storage and use in pharmacies, for example, hospital pharmacies and compounding pharmacies. In certain embodiments the kits may include a dosage amount of at least one composition as disclosed herein.

### Treatment Regimen

[0165] Any of the compositions and therapeutic combinations of the application described herein can be used in a combination treatment regimen or a treatment method of the application.

[0166] In some embodiments of the application, an effective amount of an RNAi component in the range of about 25-600 mg per dose is administered to the subject. In some embodiments, the effective amount of the RNAi component is in the range of about 25-50 mg, about 50-75 mg, about 75-100 mg, about 100-150 mg, about 150-200 mg, about 200-250 mg, about 250-300 mg, about 300-400 mg, about 400-500 mg or about 500-600 mg per dose. In some embodiments, an effective amount of the RNAi component is about 25 mg, about 30 mg, about 35 mg, about 40 mg, about 45 mg, about 50 mg, about 55 mg, about 60 mg, about 65 mg, about 70 mg, about 75 mg, about 80 mg, about 85 mg, about 90 mg, about 95 mg, about 100 mg, about 125 mg, about 150 mg, about 175 mg, about 200 mg, about 250 mg, about 300 mg, about 350 mg, about 400 mg, about 450 mg, about 500 mg, about 550 mg or about 600 mg per dose. In some embodiments, an effective amount of the RNAi component is about 25 mg, about 35 mg, about 40 mg, about 50 mg, about 100 mg or about 200 mg per dose. The effective amount of the RNAi component can be administered once per month (Q1M), per 4 weeks (Q4W), bimonthly, or any time period in between. As used herein, unless otherwise specified, the dose of an RNAi component or agent refers to the dose of the RNAi component or agent itself, and not to the dose of the composition that can contain the RNAi component or agent. For example, if an RNAi conjugate, such as an RNAi-(NAG37) s conjugate is being administered, the dose of the RNAi component or agent refers to the amount of the RNAi component or agent of the conjugate. The dose of an RNAi component refers to the combined amount of the first and second RNAi agents of the RNAi component.

[0167] In some embodiments, the first and second HBV RNAi agents of an RNAi component are administered in a molar ratio of about 1:1, 2:1, 3:1, 4:1 or 5:1. In some embodiments, the first and second HBV RNAi agents of an RNAi component are administered to a subject in a molar ratio of about 2:1.

[0168] In some embodiments, the two HBV RNAi agents are administered in a combined amount of about 25-75 mg per dose administration and in the molar ratio of about 2:1, about 3:1, about 1:1, about 4:1, about 5:1 or about 1:2. In some embodiments, the two HBV RNAi agents are administered in a combined amount of about 35-40 mg per dose administration and in the molar ratio of about 2:1, about 3:1, about 1:1, about 4:1, about 5:1 or about 1:2. In some embodiments, the two HBV RNAi agents are administered in a combined amount of about 50-125 mg per dose administration and in the molar ratio of about 2:1, about 3:1, about 1:1, about 4:1, about 5:1 or about 1:2. In some embodiments, the two HBV RNAi agents are administered in a combined amount of about 75-150 mg per dose administration and in the molar ratio of about 2:1, about 3:1, about 1:1, about 4:1, about 5:1 or about 1:2. In some embodiments, the two HBV RNAi agents are administered in a combined amount of about 100-200 mg per dose administration and in the molar ratio of about 2:1, about 3:1, about 1:1, about 4:1, about 5:1 or about 1:2. In some embodiments, the two HBV RNAi agents are administered in a combined amount of about 150-250 mg per dose administration and in the molar ratio of about 2:1, about 3:1, about 1:1, about 4:1, about 5:1 or about 1:2. In some embodiments, the two HBV RNAi agents are administered in a combined amount of about 200-300 mg per dose administration and in the molar ratio of about 2:1, about 3:1, about 1:1, about 4:1, about 5:1 or about 1:2. In some embodiments, the two HBV RNAi agents are administered in a combined amount of about 300-400 mg per dose administration and in the molar ratio of about 2:1, about 3:1, about 1:1, about 4:1, about 5:1 or about 1:2. In some embodiments, the two HBV RNAi agents are administered in a combined amount of about 50-100 mg per dose administration and in the molar ratio of about 2:1, about 3:1, about 1:1, about 4:1, about 5:1 or about 1:2. In some embodiments, the two HBV RNAi agents are administered in a combined amount of about 25-400 mg per dose administration and in the molar ratio of about 2:1. In some embodiments, the two HBV RNAi agents are administered in a combined amount of about 25-75 mg per dose administration and in the molar ratio of about 2:1. In some embodiments, the two HBV RNAi agents are administered in a combined amount of about 35-40 mg per dose administration and in the molar ratio of about 2:1. In some embodiments, the two HBV RNAi agents are administered in a combined amount of about 50-125 mg per dose administration and in the molar ratio of about 2:1. In some embodiments, the two HBV RNAi agents are administered in a combined amount of about 75-150 mg per dose administration and in the molar ratio of about 2:1. In some embodiments, the two HBV RNAi agents are administered in a combined amount of about 100-200 mg per dose administration and in the molar ratio of about 2:1. In some embodiments, the two HBV RNAi agents are administered in a combined amount of about 125-225 mg per dose administration and in the molar ratio of about 2:1. In some embodiments, the two HBV RNAi agents are administered in a combined amount of about 150)-250 mg per dose administration and in the molar ratio of about 2:1. In some embodiments, the two HBV RNAi agents are administered in a combined amount of about 200-300 mg per dose administration and in the molar ratio of about 2:1. In some embodiments, the two HBV RNAi agents are administered in a combined amount of about 300-400 mg per dose administration and in the molar ratio of about 2:1. In some embodiments, the two HBV RNAi agents are administered in a combined amount of about 100 mg per dose administration and in the molar ratio of about 2:1. In some embodiments, the two HBV RNAi agents are administered in a combined amount of about 25 mg per dose administration and in the molar ratio of about 2:1. In some embodiments, the two HBV RNAi agents are administered in a combined amount of about 35 mg per dose administration and in the molar ratio of about 2:1. In some embodiments, the two HBV RNAi agents are administered in a combined amount of about 40 mg per dose administration and in the molar ratio of about 2:1. In some embodiments, the two HBV RNAi agents are administered in a combined amount of about 50 mg per dose administration and in the molar ratio of about 2:1. In some embodiments, the two HBV RNAi agents are administered in a combined amount of about 75 mg per dose administration and in the molar ratio of about 2:1. In some embodiments, the two HBV RNAi agents are administered in a combined amount of about 200 mg per dose administration and in the molar ratio of about 2:1.

[0169] In some embodiments, the first RNAi agent is administered in an amount of about 3-650 mg per dose administration, and the second RNAi agent is administered in an amount of about 2-325 mg per dose administration. In some embodiments, the first RNAi agent is administered in an amount of about 15-150 mg per dose administration, and the second RNAi agent is administered in an amount of about 5-75 mg per dose administration. In some embodiments, the first RNAi agent is administered in an amount of about 35-265 mg per dose administration. In some embodiments, the first RNAi agent is administered in an amount of about 50-75 mg per dose administration. In some embodiments, the first RNAi agent is administered in an amount of about 15-75 mg per dose administration. In some embodiments, the second RNAi agent is administered in an amount of about 20-125 mg per dose administration. In some embodiments, the second RNAi agent is administered in an amount of about 25-50 mg per dose administration. In some embodiments, the second RNAi agent is administered in an amount of about 5-40 mg per dose administration. In some embodiments, the first RNAi agent is administered in an amount of about 17 mg per dose administration, and the second RNAi agent is administered in an amount of about 8 mg per dose administration. In some embodiments, the first RNAi agent is administered in an amount of about 23 mg per dose administration, and the second RNAi agent is administered in an amount of about 12 mg per dose administration. In some embodiments, the first RNAi agent is administered in an amount of about 27 mg per dose administration, and the second RNAi agent is administered in an amount of about 13 mg per dose administration. In some embodiments, the first RNAi agent is administered in an amount of about 33 mg per dose administration, and the second RNAi agent is administered in an amount of about 17 mg per dose administration. In some embodiments, the first RNAi agent is administered in an amount of about 67 mg per dose administration, and the second RNAi agent is administered in an amount of about 33 mg per dose administration.

[0170] In some embodiments, two RNAi agents are administered at a combined dose of 25-400 mg per dose administration. In an embodiment, two RNAi agents are administered at a combined dose of 25-400 mg, and the first RNAi agent is administered with the second RNAi agent at a molar ratio of 1:1. In an embodiment, the dose of each of the first and second RNAi agents is in an amount of about 12 mg for a combined dose of about 25 mg. In an embodiment, the dose of each of the first and second RNAi agents is in an amount of about 17 mg for a combined dose of about 35 mg. In an embodiment, the dose of each of the first and second RNAi agents is in an amount of about 20 mg for a combined dose of about 40 mg. In an embodiment, the dose of each of the first and second RNAi agents is in an amount of about 25 mg for a combined dose of about 50 mg. In an embodiment, the dose of each of the first and second RNAi agents is in an amount of about 50 mg for a combined dose of about 100 mg. In an embodiment, the dose of each of the first and second RNAi agents is in an amount of about 100) mg for a combined dose of about 200 mg. In an embodiment, the dose of each of the first and second RNAi agents is in an amount of about 150 mg for a combined dose of about 300 mg. In an embodiment, the dose of each of the first and second RNAi agents is in an amount of about 200 mg for a combined dose of about 400) mg.

[0171] In an embodiment, two RNAi agents are administered at a combined dose of 25-400 mg per dose, and the first RNAi agent is administered with the second RNAi agent at a molar ratio of 2:1. In an embodiment, the dose of the first RNAi agent is in an amount of about 16 mg, and the dose of the second RNAi agent is in an amount of about 8 mg for a combined dose of about 25 mg. In an embodiment, the dose of the first RNAi agent is in an amount of about 24 mg, and the dose of the second RNAi agent is in an amount of about 12 mg for a combined dose of about 35 mg. In an embodiment, the dose of the first RNAi agent is in an amount of about 27 mg, and the dose of the second RNAi agent is in an amount of about 13 mg for a combined dose of about 40 mg. In an embodiment, the dose of the first RNAi agent is in an amount of about 33 mg, and the dose of the second RNAi agent is in an amount of about 17 mg for a combined dose of about 50 mg. In an embodiment, the dose of the first RNAi agent is in an amount of about 65 mg, and the dose of the second RNAi agent is in an amount of about 35 mg for a combined dose of about 100 mg. In an embodiment, the dose of the first RNAi agent is in an amount of about 133 mg, and the dose of the second RNAi agent is in an amount of about 67 mg for a combined dose of about 200 mg. In an embodiment, the dose of the first RNAi agent is in an amount of about 200 mg, and the dose of the second RNAi agent is in an amount of about 100 mg for a combined dose of about 300 mg. In an embodiment, the dose of the first RNAi agent is in an amount of about 270 mg, and the dose of the second RNAi agent is in an amount of about 135 mg for a combined dose of about 400 mg.

[0172] In an embodiment, two RNAi agents are administered at a combined dose of 25-400 mg per dose, the first RNAi agent is administered with the second RNAi agent at a molar ratio of 3:1. In an embodiment, the dose of the first RNAi agent is in an amount of about 18 mg, and the dose of the second RNAi agent is in an amount of about 6 mg for a combined dose of about 25 mg. In an embodiment, the dose of the first RNAi agent is in an amount of about 27 mg, and the dose of the second RNAi agent is in an amount of about 9 mg for a combined dose of about 35 mg. In an embodiment, the dose of the first RNAi agent is in an amount of about 30 mg, and the dose of the second RNAi agent is in an amount of about 10 mg for a combined dose of about 40 mg. In an embodiment, the dose of the first RNAi agent is in an amount of about 36 mg, and the dose of the second RNAi agent is in an amount of about 12 mg for a combined dose of about 50 mg. In an embodiment, the dose of the first RNAi agent is in an amount of about 75 mg, and the dose of the second RNAi agent is in an amount of about 25 mg for a combined dose of about 100 mg. In an embodiment, the dose of the first RNAi agent is in an amount of about 150 mg, and the dose of the second RNAi agent is in an amount of about 50 mg for a combined dose of about 200 mg. In an embodiment, the dose of the first RNAi agent is in an amount of about 225 mg, and the dose of the second RNAi agent is in an amount of about 75 mg for a combined dose of about 300 mg. In an embodiment, the dose of the first RNAi agent is in an amount of about 300 mg, and the dose of the second RNAi agent is in an amount of about 100 mg for a combined dose of about 400 mg.

[0173] In some embodiments, the first RNAi agent and the second RNAi agent are administered in a combined amount of about 25-400 mg per dose administration. In some embodiments, the first RNAi agent and the second RNAi agent are administered in a combined amount of about 25-50 mg, 50-75 mg, 75-100 mg, 100-125 mg, 125-150 mg, 150-175 mg, 175-200 mg, 200-225 mg, 225-250 mg, 250-275 mg, 275-300 mg, 300-325 mg, 325-350 mg, 350-375 mg, 375-400 mg, 25-75 mg, 50-100 mg, 100-150 mg, 150-200 mg, 200-250 mg, 250-300 mg, 300-350 mg, 350-400 mg, 25-100 mg, 50-150 mg, 100-200 mg, 150-250 mg, 200-300 mg, 300-400 mg, 25-200 mg, or 200-400 mg per dose administration. In some embodiments, the first RNAi agent to the second RNAi agent are administered in a combined amount of about 25 mg, about 50 mg, about 100 mg, about 125 mg, about 150 mg, about 175 mg, about 200 mg, about 225 mg, about 250 mg, about 275 mg, about 300 mg, about 325 mg, about 350 mg, about 375 mg, or about 400 mg per dose administration. In some embodiments, the first RNAi agent and the second RNAi agent are administered in a combined amount of about 50 mg, about 75 mg, about 100 mg, or about 125 mg per dose administration. In some embodiments, the first RNAi agent and the second RNAi agent are administered in a combined amount of about 25 mg, about 35 mg, about 40 mg, or about 200 mg per dose administration.

[0174] In some embodiments, the two HBV RNAi agents are administered in a combined amount of about 1-10 mg/kg per dose administration. In some embodiments, the two HBV RNAi agents are administered in a combined amount of about 1-5 mg/kg per dose administration. In some embodiments, the two HBV RNAi agents are administered in a combined amount of about 1-1.5 mg/kg, about 1.5-2.0 mg/kg, about 2.0-2.5 mg/kg, about 2.5-3.0 mg/kg, about 3.0-3.5 mg/kg, about 3.5-4.0 mg/kg, about 4.0-4.5 mg/kg, about 4.5-5.0 mg/kg, about 5.0-5.5 mg/kg, about 5.5-6.0 mg/kg, about 6.0-6.5 mg/kg, about 6.5-7.0 mg/kg, about 7.0-7.5 mg/kg, about 7.5-8.0 mg/kg, about 8.0-8.5 mg/kg, about 8.5-9.0 mg/kg, about 9.0-9.5 mg/kg, about 9.5-10 mg/kg, about 1-2.5 mg/kg, about 2.5-5.0 mg/kg, about 5.0-7.5 mg/kg, about 7.5-10 mg/kg, about 1-5.0 mg/kg, or about 5.0-10 mg/kg per dose administration.

[0175] In some embodiments, the first RNAi agent is administered in an amount of about 0.6-7 mg/kg per dose administration, and the second RNAi agent is administered in an amount of about 0.3-5 mg/kg per dose administration. In some embodiments, the second RNAi agent is administered in an amount of about 0.5-2.5 mg/kg per dose administration. In some embodiments, the second RNAi agent is administered in an amount of about 0.3-1.5 mg/kg per dose administration. In some embodiments, the first RNAi agent is administered in an amount of about 0.6-5 mg/kg per dose administration. In some embodiments, the first RNAi agent is administered in an amount of about 1-2.5 mg/kg per dose administration.

[0176] In some embodiments, the two RNAi agents are administered in about 1-18 week intervals. In some embodiments, the two RNAi agents are administered in about 1-week intervals, about 2-week intervals, about 3-week intervals, about 4-week intervals, about 5-week intervals, about 6-week intervals, about 7-week intervals, about 8-week intervals, about 9-week intervals, about 10)-week intervals, about 11-week intervals, about 12-week intervals, about 13-week intervals, about 14-week intervals, about 15-week intervals, about 16-week intervals, about 17-week intervals, or about 18-week intervals. In some embodiments, the two RNAi agents are administered in about 1-6 month intervals. In some embodiments, the two RNAi agents are administered in about 1-month intervals, about 2-month intervals, about 3-month intervals, about 4-month intervals, about 5-month intervals, or about 6-month intervals. In some embodiments, the two RNAi agents are administered in about 4-week intervals or 1-month intervals. In some embodiments, the two RNAi agents are administered once per month.

[0177] In some embodiments, the first RNAi agent and the second RNAi agent are administered for a duration of about 1-12 months. In some embodiments, the first RNAi agent and the second RNAi agent are administered for a duration of at least about 1 month, at least about 2 months, at least about 3 months, at least about 4 months, at least about 5 months, at least about 6 months, at least about 7 months, at least about 8 months, at least about 9 months, at least about 10 months, at least about 11 months or at least about 12 months. In some embodiments, the first RNAi agent and the second RNAi agent are administered for a duration of about 1-18 weeks. In some embodiments, the first RNAi agent and the second RNAi agent are administered for a duration of at least about 1 week, at least about 5 weeks, at least about 10) weeks, at least about 15 weeks, at least about 20 weeks, at least about 25 weeks, at least about 30) weeks, at least about 35 weeks, at least about 40 weeks, at least about 45 weeks, at least about 50 weeks, at least about 55 weeks, at least about 60 weeks, at least about 65 weeks, at least about 70 weeks, at least about 75 weeks, at least about 80 weeks, at least about 90 weeks, or at least 96 weeks.

[0178] In some embodiments, the first RNAi agent and the second RNAi agent are administered at a combined dose of 25-600 mg, more particularly 25-400 mg per dose administration. In an embodiment, the first RNAi agent and the second RNAi agent are administered at a combined dose of 25-600 mg, more particularly 25-400 mg, and the first RNAi agent is administered with the second RNAi agent at a molar ratio of 1:1. In an embodiment, the dose of the first RNAi agent is administered with the second RNAi agent is in an amount of about 12 mg for a combined dose of about 25 mg. In an embodiment, the dose of each of the first RNAi agent and the second RNAi agent is in an amount of about 17 mg for a combined dose of about 35 mg. In an embodiment, the dose of each of the first RNAi agent and the second RNAi agent is in an amount of about 20 mg for a combined dose of about 40 mg. In an embodiment, the dose of each of the first RNAi agent and the second RNAi agent is in an amount of about 25 mg for a combined dose of about 50 mg. In an embodiment, the dose of each of the first RNAi agent and the second RNAi agent is in an amount of about 50 mg for a combined dose of about 100 mg. In an embodiment, the dose of each of the first RNAi agent and the second RNAi agent is in an amount of about 100 mg for a combined dose of about 200 mg. In an embodiment, the dose of each of the first RNAi agent and the second RNAi agent is in an amount of about 150 mg for a combined dose of about 300 mg. In an embodiment, the dose of each of the first RNAi agent and the second RNAi agent is in an amount of about 200 mg for a combined dose of about 400 mg.

[0179] In an embodiment, the first RNAi agent and the second RNAi agent are administered at a combined dose of 25-600) mg, more particularly 25-400 mg per dose, and the second RNAi agent is administered with the first RNAi agent at a molar ratio of 1:2. In an embodiment, the dose of the first RNAi agent is in an amount of about 16 mg, and the dose of the second RNAi agent is in an amount of about 8 mg for a combined dose of about 25 mg. In an embodiment, the dose of the second RNAi agent is in an amount of about 12 mg, and the dose of the first RNAi agent is in an amount of about 24 mg for a combined dose of about 35 mg. In an embodiment, the dose of the first RNAi agent is in an amount of about 27 mg, and the dose of the second RNAi agent is in an amount of about 13 mg for a combined dose of about 40) mg. In an embodiment, the dose of the first RNAi agent is in an amount of about 33 mg, and the dose of the second RNAi agent is in an amount of about 17 mg for a combined dose of about 50 mg. In an embodiment, the dose of the second RNAi agent is in an amount of about 35 mg, and the dose of the first RNAi agent is in an amount of about 65 mg for a combined dose of about 100 mg. In an embodiment, the dose of the second RNAi agent is in an amount of about 67 mg, and the dose of the first RNAi agent is in an amount of about 133 mg for a combined dose of about 200 mg. In an embodiment, the dose of the second RNAi agent is in an amount of about 100 mg, and the dose of the first RNAi agent is in an amount of about 200 mg for a combined dose of about 300 mg. In an embodiment, the dose of the second RNAi agent is in an amount of about 135 mg, and the dose of the first RNAi agent is in an amount of about 270 mg for a combined dose of about 400 mg.

[0180] In an embodiment, the first RNAi agent and the second RNAi agent are administered at a combined dose of 25-600 mg, more particularly 25-400 mg per dose, the second RNAi agent is administered with the first RNAi agent at a molar ratio of 1:3. In an embodiment, the dose of the first RNAi agent is in an amount of about 18 mg, and the dose of the second RNAi agent is in an amount of about 6 mg for a combined dose of about 25 mg. In an embodiment, the dose of the second RNAi agent is in an amount of about 9 mg, and the dose of the first RNAi agent is in an amount of about 27 mg for a combined dose of about 35 mg. In an embodiment, the dose of the first RNAi agent is in an amount of about 30 mg, and the dose of the second RNAi agent is in an amount of about 10 mg for a combined dose of about 40 mg. In an embodiment, the dose of the first RNAi agent is in an amount of about 36 mg, and the dose of the second RNAi agent is in an amount of about 12 mg for a combined dose of about 50 mg. In an embodiment, the dose of the second RNAi agent is in an amount of about 25 mg, and the dose of the first RNAi agent is in an amount of about 75 mg for a combined dose of about 100 mg. In an embodiment, the dose of the second RNAi agent is in an amount of about 50 mg, and the dose of the first RNAi agent is in an amount of about 150 mg for a combined dose of about 200 mg. In an embodiment, the dose of the second RNAi agent is in an amount of about 75 mg, and the dose of the first RNAi agent is in an amount of about 225 mg for a combined dose of about 300 mg. In an embodiment, the dose of the second RNAi agent is in an amount of about 100 mg, and the dose of the first RNAi agent is in an amount of about 300 mg for a combined dose of about 400 mg.

[0181] In some embodiments, about 1 mg/kg (mpk) of the first RNAi agent and about 1 mg/kg of the second RNAi agent are administered to a subject in need thereof. In some embodiments, about 1.5 mg/kg of the first RNAi agent and about 1.5 mg/kg of the second RNAi agent are administered to a subject in need thereof. In some embodiments, about 2.0 mg/kg of the first RNAi agent and about 1.0 mg/kg of the second RNAi agent are administered to a subject in need thereof. In some embodiments, about 3.0 mg/kg of the first RNAi agent and about 1.0 mg/kg of the second RNAi agent are administered to a subject in need thereof. In some embodiments, about 3.2 mg/kg of the first RNAi agent and about 0.8 mg/kg of the second RNAi agent are administered to a subject in need thereof. In some embodiments, about 2.7 mg/kg of the first RNAi agent and about 1.3 mg/kg of the second RNAi agent are administered to a subject in need thereof. In some embodiments, about 4.0 mg/kg of the first RNAi agent and about 1.0 mg/kg of the second RNAi agent are administered to a subject in need thereof. In some embodiments, about 3.3 mg/kg of the first RNAi agent and about 1.7 mg/kg of the second RNAi agent are administered to a subject in need thereof. In some embodiments, between about 0.05 and about 5 mg/kg of the first RNAi agent and between about 0.05 and about 5 mg/kg of the second RNAi agent are administered to a subject in need thereof. In some embodiments, about the first RNAi agent and about the second RNAi agent are administered separately (e.g., in separate injections). In some embodiments, the respective dose of the first RNAi agent and the respective dose of the second RNAi agent are administered together (e.g., in the same injection). In some embodiments, the respective dose of the first RNAi agent and the respective dose of the second RNAi agent are prepared in a single pharmaceutical composition.

[0182] In some embodiments, the RNAi component is administered to the subject once monthly in a dose of about 40-350 mg, such as about 40-250 mg, more particularly 40-200 mg, more particularly 100 mg or 200 mg, more particularly 200 mg.

[0183] In some embodiments, the first and the second RNAi agents are each independently conjugated to (NAG37) s, the first RNAi agent comprises an antisense strand comprising SEQ ID NO: 2 and a sense strand comprising SEQ ID NO: 11, and the second RNAi agent comprises an antisense strand comprising SEQ ID NO: 8 and a sense strand comprising SEQ ID NO: 16.

[0184] In certain embodiment, a combination of the application is used for decreasing viral replication, as measured by serum HBV DNA, in the subject with CHB, wherein the subject is not already NUC suppressed. In certain embodiment, a combination of the application is used for decreasing the expression of one or more HBV polypeptides in the subject with CHB, such as HBsAg in serum of the subject. In another embodiment, a combination of the application is used for bringing about an enhanced HBV-specific T cell response, which can be enhanced in a quantitative and/or qualitative manner, in the subject with CHB.

[0185] Methods according to embodiments of the application further comprises administering to the subject in need thereof another immunogenic agent (such as another innate immune modulator or a therapeutic vaccine) or another antiviral agent against HBV (such as a nucleoside analog or other direct antiviral compound) in combination with a composition of the application.

[0186] In some embodiments, the method further comprises administering to the subject a nucleoside analog. In some embodiments, the nucleoside analog is entecavir, tenofovir disoproxil fumarate, tenofovir alafenamide, lamivudine, telbivudine, or a combination thereof. In some embodiments, the nucleoside analog is entecavir and it is administered in the amount of about 0.01-5 mg, about 0.01-0.05 mg, about 0.05-0.1 mg, about 0.1-0.5 mg, about 0.5-1 mg, about 1-2 mg, about 2-3 mg, about 3-4 mg or about 4-5 mg. In some embodiments, the nucleoside analog is entecavir and it is administered in the amount of about 0.5 mg. In some embodiments, the nucleoside analog is tenofovir disoproxil fumarate and it is administered in the amount of about 100-500 mg, about 100-150 mg, about 150-200 mg, about 200-250 mg, about 250-300 mg, 300-400 mg, about 400-500 mg. In some embodiments, the nucleoside analog is tenofovir disoproxil fumarate and it is administered in the amount of about 300 mg In some embodiments, the nucleoside analog is tenofovir alafenamide and it is administered in the amount of about 5-100 mg, about 5-25 mg, about 25-50 mg, about 50-75 or about 75-100 mg. In some embodiments, the nucleoside analog is tenofovir alafenamide and it is administered in the amount of about 25 mg. In some embodiments, the nucleoside analog is lamivudine and it is administered in the amount of about 50-600 mg, about 100-500 mg, about 150-400 mg, about 200-350, or about 250-300 mg. In some embodiments, the nucleoside analog is lamivudine and it is administered in the amount of 150 mg or 300 mg. In some embodiments, the nucleoside analog is telbivudine and it is administered in the amount of about 300-600 mg, about 300-400 mg, about 400-500 mg, or about 500-600 mg. In some embodiments, the nucleoside analog is telbivudine and it is administered in the amount of 600 mg. In some embodiments, the patients have been exposed to the nucleoside analog prior to the combination therapy. In some embodiments, the patients have been administered the nucleoside analog for at least 1 month, at least 3 months, at least 6 months, or at least 1 year prior to receiving the combination therapy.

[0187] In some embodiments, the method further comprises administering to the subject one or more HBV-specific therapeutic vaccines selected from the group consisting of:
[0188] a subunit vaccine comprising one or more HBV-derived peptide, polypeptide or protein optionally conjugated to a carrier molecule, wherein the subunit vaccine optionally further comprises one or more adjuvants and/or one or more delivery systems, which can also provide adjuvant activity.
[0189] a recombinant viral vaccine comprising one or more viral vectors encoding the one or more HBV-derived peptide, polypeptide or protein, and optionally further encoding one or more cytokines to provide adjuvant activity.
[0190] a nucleic acid based vaccine comprising one or more DNA molecules, such as DNA plasmids, encoding the one or more HBV-derived peptide, polypeptide or protein, and optionally further encoding the one or more cytokines to provide adjuvant activity, wherein the DNA molecules are administered by intramuscular injection using a delivery system, such as liposomes and nanoparticles, or are administered to the subject with an electroporation device, or are coated onto gold particles and administered into the dermis by a ballistic device.
[0191] a nucleic acid based vaccine comprising one or more RNA molecules, such as mRNA or a self-amplifying mRNA or RNA replicon, encoding the one or more HBV-derived peptide, polypeptide or protein, and optionally further encoding the one or more cytokines to provide adjuvant activity, where the RNA molecules are administered by, for example, intramuscular delivery in a lipid nanoparticle delivery system.

[0192] In some embodiments, a combination of the application further comprises an HBV-derived peptide, polypeptide or protein comprising one or more, preferably all, of HBV core, pol and surface antigens, or a nucleic acid molecule encoding the HBV-derived peptide, polypeptide or protein. Preferably, the HBV surface antigens comprise one or more, preferably all, of small (S), medium (M) and large (L) envelope proteins. Examples of HBV-derived peptide, polypeptide or protein or its coding sequences useful for a method or combination of the present application include, but are not limited to those described in U.S. patent application publication no. US2019/0185828, the entire content of which is hereby incorporated by reference.

[0193] In some other embodiments, a combination of the application further comprises at least one other active ingredient, such as one or more from among antiviral agents, immunomodulatory agents, and Capsid Assembly Modulators (CAMs), e.g., in the form of small molecule(s), antibody(ies), polypeptide(s), protein(s) or nucleic acid(s), including, but not limited to, one or more from among immune checkpoint inhibitors (e.g., anti-PD-1, anti-TIM-3, etc.), other toll-like receptor agonists. RIG-I agonists, IL-15 superagonists (Altor Bioscience), mutant IRF3 and IRF7 genetic adjuvants. STING agonists (Aduro), FLT3L genetic adjuvant, IL-12 genetic adjuvant, IL-7-hyFc; CAR-T which bind HBV env (S-CAR cells); CAM; cccDNA inhibitors. Interferon alpha receptor ligands.

[0194] In some other embodiments, a combination of the application further comprises one or more other HBV antiviral agents, such as, an HBV polymerase inhibitor (e.g., entecavir and tenofovir); Immunomodulators; Toll-like receptor 7 modulators; Toll-like receptor 8 modulators; Toll-like receptor 3 modulators; Hyaluronidase inhibitors; Modulators of IL-10; HBsAg inhibitors; Toll like receptor 9 modulators; Cyclophilin inhibitors; HBV Prophylactic vaccines; HBV Therapeutic vaccines; HBV viral entry inhibitors; antisense oligonucleotides targeting viral mRNA, more particularly anti-HBV antisense oligonucleotides; short interfering RNAs (siRNA), more particularly anti-HBV siRNA; endonuclease modulators; inhibitors of ribonucleotide reductase; HBV E antigen inhibitors; HBV antibodies targeting the surface antigens of the hepatitis B virus; HBV antibodies; CCR2 chemokine antagonists; Thymosin agonists; cytokines, such as IL-12; Capsid Assembly Modulators (CAM), nucleoprotein inhibitors (HBV core or capsid protein inhibitors); nucleic acid polymers (NAPs); stimulators of retinoic acid-inducible gene 1; stimulators of NOD2; HBV replication inhibitors; PI3K inhibitors; cccDNA inhibitors; immune checkpoint inhibitors, such as PD-L1 inhibitors, PD-1 inhibitors, TIM-3 inhibitors, TIGIT inhibitors. Lag3 inhibitors, and CTLA-4 inhibitors; Agonists of co-stimulatory receptors that are expressed on immune cells (more particularly T cells), such as CD27, CD28; BTK inhibitors; Other drugs for treating HBV; IDO inhibitors; Arginase inhibitors; and KDM5 inhibitors.

### Method

[0195] In some embodiments, the RNAi component comprises: (i) a first RNAi agent comprising: an antisense strand comprising a nucleotide sequence of any one of the following: SEQ ID NO:1, SEQ ID NO: 2, SEQ ID NO:3, SEQ ID NO:4, SEQ ID NO:5, SEQ ID NO:6, and SEQ ID NO:7, and a sense strand comprising a nucleotide sequence of any one of the following: SEQ ID NO: 10, SEQ ID NO:11. SEQ ID NO:12, SEQ ID NO:13, SEQ ID NO:14, and SEQ ID NO:15; and (ii) a second RNAi agent comprising: an antisense strand comprising a nucleotide sequence of any one of the following: SEQ ID NO: 8 and SEQ ID NO:9, and a sense strand comprising a nucleotide sequence of any one of the following: SEQ ID NO:16, SEQ ID NO:17, SEQ ID NO:18, and SEQ ID NO:19.

[0196] In some embodiments, the first RNAi agent comprises SEQ ID NO: 5 and SEQ ID NO: 14. In some embodiments, the first RNAi agent comprises SEQ ID NO: 6 and SEQ ID NO: 14. In some embodiments, the first RNAi agent comprises SEQ ID NO: 7 and SEQ ID NO: 15. In some embodiments, the first RNAi agent comprises SEQ ID NO: 1 and SEQ ID NO: 10, 11 or 13. In some embodiments, the first RNAi agent comprises SEQ ID NO: 2 and SEQ ID NO: 10, 11 or 13. In some embodiments, the first RNAi agent comprises SEQ ID NO: 3 and SEQ ID NO: 10, 11, or 13. In some embodiments, the first RNAi agent comprises SEQ ID NO: 4 and SEQ ID NO: 12. In some embodiments, the second RNAi agent comprises SEQ ID NO: 9 and SEQ ID NO: 19. In some embodiments, the second RNAi agent comprises SEQ ID NO: 8 and SEQ ID NO: 16, 17 or 18.

[0197] In some embodiments, the RNAi component comprises a first RNAi agent comprising SEQ ID NO: 5 and SEQ ID NO: 14 and a second RNAi agent comprising SEQ ID NO: 9 and SEQ ID NO: 19. In some embodiments, the RNAi component comprises a first RNAi agent comprising SEQ ID NO: 6 and SEQ ID NO: 14 and a second RNAi agent comprising SEQ ID NO: 9 and SEQ ID NO: 19. In some embodiments, the RNAi component comprises a first RNAi agent comprising SEQ ID NO: 7 and SEQ ID NO: 15 and a second RNAi agent comprising SEQ ID NO: 9 and SEQ ID NO: 19.

[0198] In some embodiments, the RNAi component comprises a first RNAi agent comprising SEQ ID NO: 1 and SEQ ID NO: 10, 11 or 13 and a second RNAi agent comprising SEQ ID NO: 8 and SEQ ID NO: 16, 17 or 18. In some embodiments, the RNAi component comprises a first RNAi agent comprising SEQ ID NO: 2 and SEQ ID NO: 10, 11 or 13 and a second RNAi agent comprising SEQ ID NO: 8 and SEQ ID NO: 16, 17 or 18. In some embodiments, the RNAi component comprises a first RNAi agent comprising SEQ ID NO: 3 and SEQ ID NO: 10, 11 or 13 and a second RNAi agent comprising SEQ ID NO: 8 and SEQ ID NO: 16, 17 or 18. In some embodiments, the RNAi component comprises a first RNAi agent comprising SEQ ID NO: 4 and SEQ ID NO: 12 and a second RNAi agent comprising SEQ ID NO: 8 and SEQ ID NO: 16, 17 or 18.

[0199] In some embodiments, the RNAi component comprises a first RNAi agent comprising SEQ ID NO: 2 and SEQ ID NO: 11 and the second RNAi agent comprising SEQ ID NO: 16 and SEQ ID NO: 8.

[0200] In some embodiments, the two HBV RNAi agents are administered in a ratio of about 1:1, 2:1, 3:1, 4:1 or 5:1. In some embodiments, the two HBV RNAi agents are administered in a ratio of about 2:1.

[0201] In some embodiments, the two HBV RNAi agents are administered in a combined amount of about 25-75 mg per dose administration and in the ratio of about 2:1, about 3:1, about 1:1, about 4:1, about 5:1 or about 1:2. In some embodiments, the two HBV RNAi agents are administered in a combined amount of about 35-40 mg per dose administration and in the ratio of about 2:1, about 3:1, about 1:1, about 4:1, about 5:1 or about 1:2. In some embodiments, the two HBV RNAi agents are administered in a combined amount of about 50-125 mg per dose administration and in the ratio of about 2:1, about 3:1, about 1:1, about 4:1, about 5:1 or about 1:2. In some embodiments, the two HBV RNAi agents are administered in a combined amount of about 75-150 mg per dose administration and in the ratio of about 2:1, about 3:1, about 1:1, about 4:1, about 5:1 or about 1:2. In some embodiments, the two HBV RNAi agents are administered in a combined amount of about 100-200 mg per dose administration and in the ratio of about 2:1, about 3:1, about 1:1, about 4:1, about 5:1 or about 1:2. In some embodiments, the two HBV RNAi agents are administered in a combined amount of about 150-250 mg per dose administration and in the ratio of about 2:1, about 3:1, about 1:1, about 4:1, about 5:1 or about 1:2. In some embodiments, the two HBV RNAi agents are administered in a combined amount of about 200-300 mg per dose administration and in the ratio of about 2:1, about 3:1, about 1:1, about 4:1, about 5:1 or about 1:2. In some embodiments, the two HBV RNAi agents are administered in a combined amount of about 300-400 mg per dose administration and in the ratio of about 2:1, about 3:1, about 1:1, about 4:1, about 5:1 or about 1:2. In some embodiments, the two HBV RNAi agents are administered in a combined amount of about 50-100 mg per dose administration and in the ratio of about 2:1, about 3:1, about 1:1, about 4:1, about 5:1 or about 1:2. In some embodiments, the two HBV RNAi agents are administered in a combined amount of about 25-400 mg per dose administration and in the ratio of about 2:1. In some embodiments, the two HBV RNAi agents are administered in a combined amount of about 25-75 mg per dose administration and in the ratio of about 2:1. In some embodiments, the two HBV RNAi agents are administered in a combined amount of about 35-40 mg per dose administration and in the ratio of about 2:1. In some embodiments, the two HBV RNAi agents are administered in a combined amount of about 50-125 mg per dose administration and in the ratio of about 2:1. In some embodiments, the two HBV RNAi agents are administered in a combined amount of about 75-150 mg per dose administration and in the ratio of about 2:1. In some embodiments, the two HBV RNAi agents are administered in a combined amount of about 100-200 mg per dose administration and in the ratio of about 2:1. In some embodiments, the two HBV RNAi agents are administered in a combined amount of about 125-225 mg per dose administration and in the ratio of about 2:1. In some embodiments, the two HBV RNAi agents are administered in a combined amount of about 150-250 mg per dose administration and in the ratio of about 2:1. In some embodiments, the two HBV RNAi agents are administered in a combined amount of about 200-300 mg per dose administration and in the ratio of about 2:1. In some embodiments, the two HBV RNAi agents are administered in a combined amount of about 300-400 mg per dose administration and in the ratio of about 2:1. In some embodiments, the two HBV RNAi agents are administered in a combined amount of about 100) mg per dose administration and in the ratio of about 2:1. In some embodiments, the two HBV RNAi agents are administered in a combined amount of about 25 mg per dose administration and in the ratio of about 2:1. In some embodiments, the two HBV RNAi agents are administered in a combined amount of about 35 mg per dose administration and in the ratio of about 2:1. In some embodiments, the two HBV RNAi agents are administered in a combined amount of about 40) mg per dose administration and in the ratio of about 2:1. In some embodiments, the two HBV RNAi agents are administered in a combined amount of about 50 mg per dose administration and in the ratio of about 2:1. In some embodiments, the two HBV RNAi agents are administered in a combined amount of about 75 mg per dose administration and in the ratio of about 2:1. In some embodiments, the two HBV RNAi agents are administered in a combined amount of about 200 mg per dose administration and in the ratio of about 2:1.

[0202] In some embodiments, the first RNAi agent is administered in an amount of about 3-650) mg per dose administration, and the second RNAi agent is administered in an amount of about 2-325 mg per dose administration. In some embodiments, the first RNAi agent is administered in an amount of about 15-150 mg per dose administration, and the second RNAi agent is administered in an amount of about 5-75 mg per dose administration. In some embodiments, the first RNAi agent is administered in an amount of about 35-265 mg per dose administration. In some embodiments, the first RNAi agent is administered in an amount of about 50-75 mg per dose administration. In some embodiments, the first RNAi agent is administered in an amount of about 15-75 mg per dose administration. In some embodiments, the second RNAi agent is administered in an amount of about 20-125 mg per dose administration. In some embodiments, the second RNAi agent is administered in an amount of about 25-50 mg per dose administration. In some embodiments, the second RNAi agent is administered in an amount of about 5-40) mg per dose administration. In some embodiments, the first RNAi agent is administered in an amount of about 17 mg per dose administration, and the second RNAi agent is administered in an amount of about 8 mg per dose administration. In some embodiments, the first RNAi agent is administered in an amount of about 23 mg per dose administration, and the second RNAi agent is administered in an amount of about 12 mg per dose administration. In some embodiments, the first RNAi agent is administered in an amount of about 27 mg per dose administration, and the second RNAi agent is administered in an amount of about 13 mg per dose administration. In some embodiments, the first RNAi agent is administered in an amount of about 33 mg per dose administration, and the second RNAi agent is administered in an amount of about 17 mg per dose administration. In some embodiments, the first RNAi agent is administered in an amount of about 67 mg per dose administration, and the second RNAi agent is administered in an amount of about 33 mg per dose administration.

[0203] In some embodiments, two RNAi agents are administered at a combined dose of 25-400 mg per dose administration. In an embodiment, two RNAi agents are administered at a combined dose of 25-400 mg, and the first RNAi agent is administered with the second RNAi agent at a ratio of 1:1. In an embodiment, the dose of each of the first and second RNAi agents is in an amount of about 12 mg for a combined dose of about 25 mg. In an embodiment, the dose of each of the first and second RNAi agents is in an amount of about 17 mg for a combined dose of about 35 mg. In an embodiment, the dose of each of the first and second RNAi agents is in an amount of about 20 mg for a combined dose of about 40) mg. In an embodiment, the dose of each of the first and second RNAi agents is in an amount of about 25 mg for a combined dose of about 50 mg. In an embodiment, the dose of each of the first and second RNAi agents is in an amount of about 50 mg for a combined dose of about 100 mg. In an embodiment, the dose of each of the first and second RNAi agents is in an amount of about 100 mg for a combined dose of about 200 mg. In an embodiment, the dose of each of the first and second RNAi agents is in an amount of about 150 mg for a combined dose of about 300 mg. In an embodiment, the dose of each of the first and second RNAi agents is in an amount of about 200 mg for a combined dose of about 400 mg.

[0204] In an embodiment, two RNAi agents are administered at a combined dose of 25-400 mg per dose, and the first RNAi agent is administered with the second RNAi agent at a ratio of 2:1. In an embodiment, the dose of the first RNAi agent is in an amount of about 16 mg, and the dose of the second RNAi agent is in an amount of about 8 mg for a combined dose of about 25 mg. In an embodiment, the dose of the first RNAi agent is in an amount of about 24 mg, and the dose of the second RNAi agent is in an amount of about 12 mg for a combined dose of about 35 mg. In an embodiment, the dose of the first RNAi agent is in an amount of about 27 mg, and the dose of the second RNAi agent is in an amount of about 13 mg for a combined dose of about 40 mg. In an embodiment, the dose of the first RNAi agent is in an amount of about 33 mg, and the dose of the second RNAi agent is in an amount of about 17 mg for a combined dose of about 50 mg. In an embodiment, the dose of the first RNAi agent is in an amount of about 65 mg, and the dose of the second RNAi agent is in an amount of about 35 mg for a combined dose of about 100 mg. In an embodiment, the dose of the first RNAi agent is in an amount of about 133 mg, and the dose of the second RNAi agent is in an amount of about 67 mg for a combined dose of about 200 mg. In an embodiment, the dose of the first RNAi agent is in an amount of about 200 mg, and the dose of the second RNAi agent is in an amount of about 100 mg for a combined dose of about 300 mg. In an embodiment, the dose of the first RNAi agent is in an amount of about 270 mg, and the dose of the second RNAi agent is in an amount of about 135 mg for a combined dose of about 400 mg.

[0205] In an embodiment, two RNAi agents are administered at a combined dose of 25-400 mg per dose, the first RNAi agent is administered with the second RNAi agent at a ratio of 3:1. In an embodiment, the dose of the first RNAi agent is in an amount of about 18 mg, and the dose of the second RNAi agent is in an amount of about 6 mg for a combined dose of about 25 mg. In an embodiment, the dose of the first RNAi agent is in an amount of about 27 mg, and the dose of the second RNAi agent is in an amount of about 9 mg for a combined dose of about 35 mg. In an embodiment, the dose of the first RNAi agent is in an amount of about 30 mg, and the dose of the second RNAi agent is in an amount of about 10 mg for a combined dose of about 40 mg. In an embodiment, the dose of the first RNAi agent is in an amount of about 36 mg, and the dose of the second RNAi agent is in an amount of about 12 mg for a combined dose of about 50 mg. In an embodiment, the dose of the first RNAi agent is in an amount of about 75 mg, and the dose of the second RNAi agent is in an amount of about 25 mg for a combined dose of about 100 mg. In an embodiment, the dose of the first RNAi agent is in an amount of about 150 mg, and the dose of the second RNAi agent is in an amount of about 50 mg for a combined dose of about 200 mg. In an embodiment, the dose of the first RNAi agent is in an amount of about 225 mg, and the dose of the second RNAi agent is in an amount of about 75 mg for a combined dose of about 300 mg. In an embodiment, the dose of the first RNAi agent is in an amount of about 300 mg, and the dose of the second RNAi agent is in an amount of about 100 mg for a combined dose of about 400 mg.

[0206] In some embodiments, the first RNAi agent and the second RNAi agent are administered in a combined amount of about 25-400 mg per dose administration. In some embodiments, the first RNAi agent and the second RNAi agent are administered in a combined amount of about 25-50 mg, 50-75 mg, 75-100 mg, 100-125 mg, 125-150 mg, 150-175 mg, 175-200 mg, 200-225 mg, 225-250 mg, 250-275 mg, 275-300 mg, 300-325 mg, 325-350 mg, 350-375 mg, 375-400 mg, 25-75 mg, 50-100 mg, 100-150 mg, 150-200 mg, 200-250 mg, 250-300 mg, 300-350 mg, 350-400 mg, 25-100 mg, 50-150 mg, 100-200 mg, 150-250 mg, 200-300 mg, 300-400 mg, 25-200 mg, or 200-400 mg per dose administration. In some embodiments, the first RNAi agent to the second RNAi agent are administered in a combined amount of about 25 mg, about 50 mg, about 100 mg, about 125 mg, about 150 mg, about 175 mg, about 200 mg, about 225 mg, about 250 mg, about 275 mg, about 300 mg, about 325 mg, about 350 mg, about 375 mg, or about 400 mg per dose administration. In some embodiments, the first RNAi agent and the second RNAi agent are administered in a combined amount of about 50 mg, about 75 mg, about 100 mg, or about 125 mg per dose administration. In some embodiments, the first RNAi agent and the second RNAi agent are administered in a combined amount of about 25 mg, about 35 mg, about 40 mg, or about 200 mg per dose administration.

[0207] In some embodiments, the two HBV RNAi agents are administered in a combined amount of about 1-10 mg/kg per dose administration. In some embodiments, the two HBV RNAi agents are administered in a combined amount of about 1-5 mg/kg per dose administration. In some embodiments, the two HBV RNAi agents are administered in a combined amount of about 1-1.5 mg/kg, about 1.5-2.0 mg/kg, about 2.0-2.5 mg/kg, about 2.5-3.0 mg/kg, about 3.0-3.5 mg/kg, about 3.5-4.0 mg/kg, about 4.0-4.5 mg/kg, about 4.5-5.0 mg/kg, about 5.0-5.5 mg/kg, about 5.5-6.0 mg/kg, about 6.0-6.5 mg/kg, about 6.5-7.0 mg/kg, about 7.0-7.5 mg/kg, about 7.5-8.0 mg/kg, about 8.0-8.5 mg/kg, about 8.5-9.0 mg/kg, about 9.0-9.5 mg/kg, about 9.5-10 mg/kg, about 1-2.5 mg/kg, about 2.5-5.0 mg/kg, about 5.0-7.5 mg/kg, about 7.5-10 mg/kg, about 1-5.0 mg/kg, or about 5.0-10 mg/kg per dose administration.

[0208] In some embodiments, the first RNAi agent is administered in an amount of about 0.6-7 mg/kg per dose administration, and the second RNAi agent is administered in an amount of about 0.3-5 mg/kg per dose administration. In some embodiments, the second RNAi agent is administered in an amount of about 0.5-2.5 mg/kg per dose administration. In some embodiments, the second RNAi agent is administered in an amount of about 0.3-1.5 mg/kg per dose administration. In some embodiments, the first RNAi agent is administered in an amount of about 0.6-5 mg/kg per dose administration. In some embodiments, the first RNAi agent is administered in an amount of about 1-2.5 mg/kg per dose administration.

[0209] In some embodiments, the two RNAi agents are administered in about 1-18 week intervals. In some embodiments, the two RNAi agents are administered in about 1-week intervals, about 2-week intervals, about 3-week intervals, about 4-week intervals, about 5-week intervals, about 6-week intervals, about 7-week intervals, about 8-week intervals, about 9-week intervals, about 10-week intervals, about 11-week intervals, about 12-week intervals, about 13-week intervals, about 14-week intervals, about 15-week intervals, about 16-week intervals, about 17-week intervals, or about 18-week intervals. In some embodiments, the two RNAi agents are administered in about 1-6 month intervals. In some embodiments, the two RNAi agents are administered in about 1-month intervals, about 2-month intervals, about 3-month intervals, about 4-month intervals, about 5-month intervals, or about 6-month intervals. In some embodiments, the two RNAi agents are administered in about 4-week intervals or 1-month intervals. In some embodiments, the two RNAi agents are administered once per month.

[0210] In some embodiments, the first RNAi agent and the second RNAi agent are administered for a duration of about 1-12 months. In some embodiments, the first RNAi agent and the second RNAi agent are administered for a duration of at least about 1 month, at least about 2 months, at least about 3 months, at least about 4 months, at least about 5 months, at least about 6 months, at least about 7 months, at least about 8 months, at least about 9 months, at least about 10 months, at least about 11 months or at least about 12 months. In some embodiments, the first RNAi agent and the second RNAi agent are administered for a duration of about 1-18 weeks. In some embodiments, the first RNAi agent and the second RNAi agent are administered for a duration of at least about 1 week, at least about 5 weeks, at least about 10 weeks, at least about 15 weeks, at least about 20 weeks, at least about 25 weeks, at least about 30 weeks, at least about 35 weeks, at least about 40 weeks, at least about 45 weeks, at least about 50 weeks, at least about 55 weeks, at least about 60 weeks, at least about 65 weeks, at least about 70 weeks, at least about 75 weeks, at least about 80 weeks, at least about 90 weeks, or at least 96 weeks.

[0211] In some embodiments, the first RNAi agent and the second RNAi agent are administered at a combined dose of 25-400 mg per dose administration. In an embodiment, the first RNAi agent and the second RNAi agent are administered at a combined dose of 25-400 mg, and the first RNAi agent is administered with the second RNAi agent at a ratio of 1:1. In an embodiment, the dose of the first RNAi agent is administered with the second RNAi agent is in an amount of about 12 mg for a combined dose of about 25 mg. In an embodiment, the dose of each of the first RNAi agent and the second RNAi agent is in an amount of about 17 mg for a combined dose of about 35 mg. In an embodiment, the dose of each of the first RNAi agent and the second RNAi agent is in an amount of about 20 mg for a combined dose of about 40 mg. In an embodiment, the dose of each of the first RNAi agent and the second RNAi agent is in an amount of about 25 mg for a combined dose of about 50 mg. In an embodiment, the dose of each of the first RNAi agent and the second RNAi agent is in an amount of about 50 mg for a combined dose of about 100 mg. In an embodiment, the dose of each of the first RNAi agent and the second RNAi agent is in an amount of about 100 mg for a combined dose of about 200 mg. In an embodiment, the dose of each of the first RNAi agent and the second RNAi agent is in an amount of about 150 mg for a combined dose of about 300 mg. In an embodiment, the dose of each of the first RNAi agent and the second RNAi agent is in an amount of about 200 mg for a combined dose of about 400 mg.

[0212] In an embodiment, the first RNAi agent and the second RNAi agent are administered at a combined dose of 25-400 mg per dose, and the second RNAi agent is administered with the first RNAi agent at a ratio of 1:2. In an embodiment, the dose of the first RNAi agent is in an amount of about 16 mg, and the dose of the second RNAi agent is in an amount of about 8 mg for a combined dose of about 25 mg. In an embodiment, the dose of the second RNAi agent is in an amount of about 12 mg, and the dose of the first RNAi agent is in an amount of about 24 mg for a combined dose of about 35 mg. In an embodiment, the dose of the first RNAi agent is in an amount of about 27 mg, and the dose of the second RNAi agent is in an amount of about 13 mg for a combined dose of about 40 mg. In an embodiment, the dose of the first RNAi agent is in an amount of about 33 mg, and the dose of the second RNAi agent is in an amount of about 17 mg for a combined dose of about 50 mg. In an embodiment, the dose of the second RNAi agent is in an amount of about 35 mg, and the dose of the first RNAi agent is in an amount of about 65 mg for a combined dose of about 100 mg. In an embodiment, the dose of the second RNAi agent is in an amount of about 67 mg, and the dose of the first RNAi agent is in an amount of about 133 mg for a combined dose of about 200 mg. In an embodiment, the dose of the second RNAi agent is in an amount of about 100 mg, and the dose of the first RNAi agent is in an amount of about 200 mg for a combined dose of about 300 mg. In an embodiment, the dose of the second RNAi agent is in an amount of about 135 mg, and the dose of the first RNAi agent is in an amount of about 270 mg for a combined dose of about 400) mg.

[0213] In an embodiment, the first RNAi agent and the second RNAi agent are administered at a combined dose of 25-400 mg per dose, the second RNAi agent is administered with the first RNAi agent at a ratio of 1:3. In an embodiment, the dose of the first RNAi agent is in an amount of about 18 mg, and the dose of the second RNAi agent is in an amount of about 6 mg for a combined dose of about 25 mg. In an embodiment, the dose of the second RNAi agent is in an amount of about 9 mg, and the dose of the first RNAi agent is in an amount of about 27 mg for a combined dose of about 35 mg. In an embodiment, the dose of the first RNAi agent is in an amount of about 30 mg, and the dose of the second RNAi agent is in an amount of about 10 mg for a combined dose of about 40 mg. In an embodiment, the dose of the first RNAi agent is in an amount of about 36 mg, and the dose of the second RNAi agent is in an amount of about 12 mg for a combined dose of about 50 mg. In an embodiment, the dose of the second RNAi agent is in an amount of about 25 mg, and the dose of the first RNAi agent is in an amount of about 75 mg for a combined dose of about 100 mg. In an embodiment, the dose of the second RNAi agent is in an amount of about 50 mg, and the dose of the first RNAi agent is in an amount of about 150 mg for a combined dose of about 200 mg. In an embodiment, the dose of the second RNAi agent is in an amount of about 75 mg, and the dose of the first RNAi agent is in an amount of about 225 mg for a combined dose of about 300 mg. In an embodiment, the dose of the second RNAi agent is in an amount of about 100 mg, and the dose of the first RNAi agent is in an amount of about 300 mg for a combined dose of about 400 mg.

[0214] In some embodiments, about 1 mg/kg (mpk) of the first RNAi agent and about 1 mg/kg of the second RNAi agent are administered to a subject in need thereof. In some embodiments, about 1.5 mg/kg of the first RNAi agent and about 1.5 mg/kg of the second RNAi agent are administered to a subject in need thereof. In some embodiments, about 2.0 mg/kg of the first RNAi agent and about 1.0 mg/kg of the second RNAi agent are administered to a subject in need thereof. In some embodiments, about 3.0 mg/kg of the first RNAi agent and about 1.0 mg/kg of the second RNAi agent are administered to a subject in need thereof. In some embodiments, about 3.2 mg/kg of the first RNAi agent and about 0.8 mg/kg of the second RNAi agent are administered to a subject in need thereof. In some embodiments, about 2.7 mg/kg of the first RNAi agent and about 1.3 mg/kg of the second RNAi agent are administered to a subject in need thereof. In some embodiments, about 4.0 mg/kg of the first RNAi agent and about 1.0 mg/kg of the second RNAi agent are administered to a subject in need thereof. In some embodiments, about 3.3 mg/kg of the first RNAi agent and about 1.7 mg/kg of the second RNAi agent are administered to a subject in need thereof. In some embodiments, between about 0.05 and about 5 mg/kg of the first RNAi agent and between about 0.05 and about 5 mg/kg of the second RNAi agent are administered to a subject in need thereof. In some embodiments, about the first RNAi agent and about the second RNAi agent are administered separately (e.g., in separate injections). In some embodiments, the respective dose of the first RNAi agent and the respective dose of the second RNAi agent are administered together (e.g., in the same injection). In some embodiments, the respective dose of the first RNAi agent and the respective dose of the second RNAi agent are prepared in a single pharmaceutical composition.

[0215] In some embodiments, the RNAi component is administered to the subject once monthly in a dose of about 40-350 mg, such as about 40-250 mg, more particularly 40-200 mg, more particularly 100 mg or 200 mg, more particularly 200 mg.

[0216] In some embodiments, the method further comprises administering a nucleoside analog. In some embodiments, the nucleoside analog is entecavir, tenofovir disoproxil fumarate, tenofovir alafenamide, lamivudine, telbivudine, or a combination thereof. In some embodiments, the nucleoside analog is entecavir and it is administered in a daily dose in the amount of about 0.01-5 mg, about 0.01-0.05 mg, about 0.05-0.1 mg, about 0.1-0.5 mg, about 0.5-1 mg, about 1-2 mg, about 2-3 mg, about 3-4 mg or about 4-5 mg. In some embodiments, the nucleoside analog is entecavir and it is administered in a daily dose in the amount of about 0.5 mg. In some embodiments, the nucleoside analog is tenofovir disoproxil fumarate and it is administered in a daily dose in the amount of about 100-500 mg, about 100-150 mg, about 150-200 mg, about 200-250 mg, about 250-300 mg, 300-400 mg, about 400-500 mg. In some embodiments, the nucleoside analog is tenofovir disoproxil fumarate and it is administered in a daily dose in the amount of about 300 mg. In some embodiments, the nucleoside analog is tenofovir alafenamide and it is administered in a daily dose in the amount of about 5-100 mg, about 5-25 mg, about 25-50 mg, about 50-75 or about 75-100 mg. In some embodiments, the nucleoside analog is tenofovir alafenamide and it is administered in a daily dose in the amount of about 25 mg. In some embodiments, the nucleoside analog is lamivudine and it is administered in a daily dose in the amount of about 50-600 mg, about 50-300 mg, about 100-300 mg, about 100-500 mg, about 150-400 mg, about 200-350, or about 250-300 mg. In some embodiments, the nucleoside analog is lamivudine and it is administered in a daily dose in the amount of 100 mg, 150 mg, or 300 mg. In some embodiments, the nucleoside analog is telbivudine and it is administered in a daily dose in the amount of about 300-800 mg, about 400-700 mg, about 300-600 mg, about 300-400 mg, about 400-500 mg, or about 500-600 mg. In some embodiments, the nucleoside analog is telbivudine and it is administered in a daily dose in the amount of 600 mg. In some embodiments, the patients have been exposed to the nucleoside analog prior to the combination therapy. In some embodiments, the patients have been administered the nucleoside analog for at least 1 month, at least 3 months, at least 6 months, or at least 1 year prior to receiving the combination therapy.

[0217] In embodiments, the method further comprises administering a nucleic acid polymer (NAP). The NAP can, for example, be selected from REP2139 or REP2165. REP2139 has a sequence of (A.5′MeC)₂₀ with each linkage being phosphorothioated and every ribose being 2′O methylated (which is disclosed as SEQ ID NO:10 in WO2016/04525, the content of which is incorporated herein by reference in its entirety). REP2165 has a sequence of (A.5′MeC)₂₀ with each linkage being phosphorothioated, every ribose being 2′O methylated except adenosines at positions 11, 21, and 31, where riboses are 2′OH (which is disclosed as SEQ ID NO:13 in WO2016/04525).

[0218] The NAP can also be other exemplary nucleic acid polymers, which include, but are not limited to, REP2006, REP2031, REP2055, STOPS™ (S-antigen transport-inhibiting oligonucleotide polymers), and those disclosed in Patent Application Publication Nos. WO200424919: WO201221985; and WO202097342 and U.S. Pat. Nos. 7,358,068; 8,008,269; 8,008,270; and 8,067,385, the content of each is incorporated herein by reference in its entirety.

[0219] In some embodiments, the patients are screened for HBeAg status prior to administration of the combination therapy. In some embodiments, the patients are HBeAg positive. In some embodiments, the patients are HBeAg negative. In some embodiment, the patients are screened for immune tolerance prior to administration of the combination therapy.

[0220] In some embodiments, the HBsAg level in the patient is reduced by at least about log₁₀ 0.5, about log₁₀ 0.75, about log₁₀ 1, about log₁₀ 1.25, about log₁₀ 1.5, about log₁₀ 1.75, about log₁₀ 2 or about log₁₀ 2.5 from base line on Day 1. In some embodiments, the HBeAg level in the patient is reduced by at least about log₁₀ 0.5, about log₁₀ 0.75, about log₁₀ 1, about log₁₀ 1.25, about log₁₀ 1.5, about log₁₀ 1.75, about log₁₀ 2 or about log₁₀ 2.5 from base line on Day 1. In some embodiments, the HBcrAg level in the patient is reduced by at least about log₁₀ 0.5, about log₁₀ 0.75, about log₁₀ 1, about log₁₀ 1.25, about log₁₀ 1.5, about log₁₀ 1.75, about log₁₀ 2 or about log₁₀ 2.5 from base line on Day 1. In some embodiments, the HBV DNA level in the patient is reduced by at least about log₁₀ 0.5, about log₁₀ 1, about log₁₀ 1.5, about log₁₀ 2, about log 103, about log₁₀ 4, about log₁₀ 5 or about log₁₀ 7.5 from base line on Day 1. In some embodiments, the HBV RNA level in the patient is reduced by at least about log₁₀ 0.5, about log₁₀ 0.75, about log₁₀ 1, about log₁₀ 1.25, about log₁₀ 1.5, about log₁₀ 1.75, about log₁₀ 2 or about log₁₀ 2.5 from base line on Day 1.

[0221] For drugs that are substantially eliminated via renal excretion, impaired renal function may lead to alterations in their PK or pharmacodynamics (PD) to such an extent that an established dosing regimen in participants with normal renal function requires adjustment in participants with renal impairment. Therefore, the degree of impairment of renal function needs to be taken into consideration when prescribing a dosing regimen in these participants. The US Food and Drug Administration (FDA) and European Medicines Agency (EMA) Committee for Medicinal Products for Human Use (CHMP) guidance's on studies in patients with impaired renal function state that a PK study in participants with impaired renal function is recommended when renal impairment is likely to significantly alter the PK of the drug and/or its active or toxic metabolite(s). A renal impairment study should still be considered for a drug that is eliminated primarily by hepatic metabolism unless it has a relatively wide therapeutic index.

[0222] Renal sufficiency can be measured by several methods. For example, by estimating creatinineclearance (CLCR) in an individual using serum creatinine level according to the Chronic Kidney Disease Epidemiology Collaboration (CKD EPI) equation. An individual can be classified as having normal renal function if the creatinine clearance rate is greater than or equal to 90 mL/min/1.73 m², and so forth, up to an individual who requires hemodialysis (end stage renal disease (ESRD)).

Classification of Renal Function Based on Estimates Glomerular Filtration Rate (eGFR)

| Stage | Renal Function | eGFR (mL/min/1.73 m²) |
|---|---|---|
| 1 | Control (normal) | ≥90 |
| 2 | Mild impairment | 60 to 89 |
| 3 | Moderate impairment | 30 to 59 |
| 4 | Severe impairment | 15 to 29 |
| 5 | End Stage Renal Disease | <15 not on dialysis |
| | (ESRD) | Requiring dialysis |

eGFR—Estimate of glomerular filtration rate (GFR) based on the CKD-EPI equation

[0223] In a particular embodiment, the subject has previously been determined to have no renal impairment.

[0224] In a further embodiment, the subject has previously been determined to have renal impairment. More in particular, the subject has been determined to have mild, moderate or several renal impairment. In a yet further embodiment, the subject is affected with renal impairment or ESRD. In another embodiment, the subject is affected with ESRD and not on hemodialysis. In a further embodiment, the subject is affected with ESRD requiring hemodialysis.

[0225] In embodiments of the methods of treating HBV infection provided herein, the patient, individual or subject in need thereof is a chronically HBV-infected patient, with or without evidence of underlying liver inflammation. In some embodiments, the patient has a chronic HBV infection. In other embodiments, the patient is suffering from an HBV-induced disease. In some embodiments, the HBV-induced disease is cirrhosis, liver failure or hepatocellular carcinoma. In other embodiments, the patient is a treatment-naïve patient. More in particular, the patient is a chronically HBV-infected treatment-naïve patient. In a further embodiment, the patient is HBeAg-positive. In still a further embodiment, the patient is treatment-naïve and HBeAg-positive.

[0226] In an embodiment, the methods further comprise administering to the subject at least one additional therapeutic agent selected from a nucleoside analog, in particular, tenofovir, or a pharmaceutically acceptable salt or prodrug thereof, or entecavir, or a pharmaceutically acceptable salt or solvate thereof. In an embodiment of the method, the nucleoside analog is selected from the group consisting of entecavir monohydrate, tenofovir disoproxil fumarate and tenofovir alafenamide. In an embodiment of the method, the nucleoside analog is entecavir monohydrate. In an embodiment of the method, the nucleoside analog is tenofovir disoproxil fumarate. In a further embodiment of the method, the nucleoside analog is tenofovir alafenamide.

[0227] In an embodiment of the method, the tenofovir disoproxil fumarate is administered in an amount of 60-600 mg. In another embodiment of the method, the tenofovir disoproxil fumarate is administered in an amount of 300 mg. In yet another embodiment of the method, the entecavir monohydrate is administered in an amount of 0.1-1 mg. In still another embodiment of the method, the entecavir monohydrate is administered in an amount of 0.5 mg. In another embodiment of the method, the tenofovir alafenamide is administered in an amount of 25 mg.

[0228] In an embodiment, the methods further comprise administering to the subject at least one additional therapeutic agent selected from the group consisting of HBV combination drugs. HBV vaccines. HBV DNA polymerase inhibitors, immunomodulators, toll-like receptor (TLR) modulators, interferon alpha receptor ligands, hyaluronidase inhibitors, hepatitis b surface antigen (HBsAg) inhibitors, cytotoxic T-lymphocyte-associated protein 4 (ipi4) inhibitors, cyclophilin inhibitors, HBV viral entry inhibitors, antisense oligonucleotide targeting viral mRNA, short interfering RNAs (siRNA) and ddRNAi endonuclease modulators, ribonucleotide reductase inhibitors, HBV E antigen inhibitors, covalently closed circular DNA (cccDNA) inhibitors, famesoid X receptor agonists, HBV antibodies, CCR2 chemokine antagonists, thymosin agonists, cytokines, nucleoprotein modulators, retinoic acid-inducible gene 1 simulators, NOD2 stimulators, phosphatidylinositol 3-kinase (PI3K) inhibitors, indoleamine-2,3-dioxygenase (IDO) pathway inhibitors, PD-1 inhibitors, PD-L1 inhibitors, recombinant thymosin alpha-1, bruton's tyrosine kinase (BTK) inhibitors, KDM inhibitors, HBV replication inhibitors, arginase inhibitors, and other HBV drugs.

### Example

[0229] An open-label, parallel-group, single-dose, PK study will be performed with a single 200 mg dose of an RNAi component comprising a first RNAi agent comprising an antisense strand comprising SEQ ID NO: 2 and a sense strand comprising SEQ ID NO: 11 and a second RNAi agent comprising an antisense strand comprising SEQ ID NO: 8 and a sense strand comprising SEQ ID NO: 16 (with the first RNAi agent and the second RNAi agent present in a molar ratio of 2:1) in men and women between 18 to 80 years of age, inclusive, with moderate and severe renal impairment/ESRD, not on dialysis with no other major co-morbidity and healthy participants with normal renal function as the control group. The design of the study follows current recommendations from the US FDA guidance (FDA Guidance 2020) and the EMA guideline (EMA Guideline 2015) on the evaluation of PK of medicinal products in participants with impaired renal function.

[0230] The following PK parameters will be evaluated:

### Abbreviations

Cₘₐₓ is defined as the maximum observed plasma analyte concentration
tₘₐₓ is defined as the actual sampling time to reach the maximum observed plasma analyte
concentration
AUC_{24 h} is defined as area under the analyte concentration-time curve (AUC) from time 0 to 24 hours
postdose, calculated by linear-linear trapezoidal summation
AUC_{144 h} is defined as AUC from time 0 to 144 hours postdose, calculated by linear-linear trapezoidal
summation
AUCₗₐₛₜ is defined as AUC from time 0 to time of the last measurable (non-below quantification limit
[non-BQL]) concentration, calculated by linear-linear trapezoidal summation
AUC_{∞} is defined as AUC from time 0 to infinity, calculated as the sum of AUC (0-last) and Cₗₐₛₜ/λ_{z};
where Cₗₐₛₜ is the last observed measurable (non-BQL) concentration; and λ_{z} is apparent terminal
elimination rate constant
CL/F is defined as total apparent oral clearance, calculated as dose/AUC_{∞}
V_{d}/F is defined as apparent volume of distribution, calculated as dose/[λ_{z}*AUC_{∞}]
λ_{z} is defined as apparent terminal elimination rate constant, estimated by linear regression using the
terminal log-linear phase of the log-transformed concentration vs time curve
t_{1/2} is defined as apparent terminal elimination half-life, calculated as 0.693/λ_{z}

### Study Design

[0232] After signing the study informed consent document, participants will be screened for study entry eligibility. To evaluate the renal function for eligibility, 2 samples for serum creatinine must be available before Day 1 (minimum of 7 days between samples) for the estimation of glomerular filtration rate using serum creatinine (eGFRcr). A historical sample taken not more than 3 months prior to screening visit using the same laboratory can be used as first sample. The eGFRer will be calculated based on the serum creatinine values and will be computed using the online calculator on the CKD-EPI website (http://ckdepi.org/equations/gfr-calculator/) providing eGFR (in mL/min) by use of the CKD-EPIcr result. The underlying disease leading to renal impairment (e.g., renovascular disease, diabetic nephropathy etc) will be documented.

[0233] The mean of the 2 eGFRcr values will be used to determine renal function as shown in the table below:

TABLE 7
Classification of renal function based
on estimated glomerular filtration rate

| Renal Function | eGFRcr (mL/min) |
|---|---|
| Control (normal) | ≥90 |
| Mild impairment | 60-89 |
| Moderate impairment | 30-59 |
| Severe impairment | 15-29 |
| End-stage renal disease (ESRD), not on dialysis | <15 |

eGFRcr—Estimate of GFR based on the CKD-EPI creatinine equation

[0234] The study is a parallel-group study design comparing participants with moderate or severe renal impairment/ESRD, not on dialysis, to healthy participants with normal renal function.
[0235] Group 1:8 participants with moderate renal impairment (eGFRcr<60 mL/min and ≥30 mL/min)
[0236] Group 2:8 participants with severe renal impairment or ESRD, not on dialysis (eGFRcr<30 mL/min)
[0237] Group 3:8-16 healthy participants with normal renal function (eGFRcr≥90 mL/min)

[0238] A total of 24-32 participants are expected to be enrolled. Based on the eGFRcr, 8 participants with moderate renal impairment (<60 mL/min and ≥30 mL/min. Group 1) and 8 participants with severe renal impairment/ESRD, not on dialysis (<30 mL/min. Group 2), will be enrolled in parallel. Up to sixteen case-matched healthy participants with normal renal function (Group 3) will be enrolled in parallel.

[0239] An individual matching procedure will be used to demographically match the participants with normal renal function with respect to age, weight, and sex to the participants enrolled in the renal impairment group. For each participant in the group of moderate or severe renal impairment/ESRD, not on dialysis, a healthy participant with normal renal function of the same sex, similar age (within the range of ±10 years), and similar body weight at screening (within the range of ±10 kg) will be enrolled in the control group (Group 3). Participants with normal renal function may be used to match up to 2 participants with renal impairment, including 1 moderate renal impairment and 1 severe renal impairment/ESRD, not on dialysis participant.

[0240] For Group 1 and Group 2 (participants with moderate and severe renal impairment/ESRD, not on dialysis, respectively), further enrolment to the study will be paused after the 4^{th} participant in each group completes his/her postdose assessments on Day 4. Upon evaluation of the safety data obtained from the first 4 participants, the SET will confirm enrolment of the next 4 participants in the respective groups. This enrolment strategy is not necessary for Group 3 (healthy participants with normal renal function).

[0241] The study will consist of a screening phase (within 28 days before study drug administration); an open-label treatment phase (Day −1 until Day 4) with single-dose treatment on Day 1 and 4 days of PK sampling, and EOS/follow-up assessments on Day 14. Participants who withdraw from the study before completion of the planned PK assessments will have the EOS assessments performed before discharge. The total study length for an individual participant will be approximately 42 days (including screening and EOS/follow-up assessments).

[0242] Participants will be confined to the study center from Day −1 morning until completion of the 72-hour PK blood and urine sample collection on Day 4. Participants will revisit the study center on Day 14 for follow-up assessments. Participant safety will be monitored throughout the study.

[0243] In addition, samples for determination of the PPB will be collected, predose on Day 1 and postdose plasma samples around the time of Cₘₐₓ of 6 hours, from all participants in each group.

### Inclusion Criteria

### Age

[0244] 1. Man or woman 18 to 80 years of age, inclusive.

### Type of Participant and Disease Characteristic

Participants with Normal Renal Function Must Meet the Following Additional Inclusion Criteria to be Enrolled in the Study:
[0245] 2. Must have stable renal function defined as a change in serum creatinine concentration <0.2 mg/dL between screening and Day −1.
[0246] 3. Have normal renal function defined as eGFR ≥90 mL/min computed with the online calculator on the CKD-EPI website (http://ckdepi.org/equations/gfr-calculator/) providing eGFR (in mL/min) by use of the CKD-EPIcr result.
[0247] 4. After being supine for 5 minutes, systolic blood pressure between 90 mmHg and 140 mmHg (or 150 mmHg if the age is above 60 years), inclusive; diastolic blood pressure between 60 mmHg and 90 mmHg, inclusive. Participants need to have stable blood pressure readings. If blood pressure is out of range, up to 2 repeated assessments are permitted. Additionally, participants must have a 12-lead ECG consistent with normal cardiac conduction and function, including:
   [0248] Elderly participants with no clinically significant arrhythmia in the opinion of the investigator
   [0249] Pulse rate between 50 and 95 (inclusive) beats per minute
   [0250] QT interval corrected for heart rate (QTc) interval ≤450 ms in male participants/≤470 ms in female participants (corrected cf. Fridericia; QTcF)
   [0251] QRS interval of <120 ms
   [0252] PR interval <220 ms
[0253] 5. Laboratory parameters must be within:
   [0254] ALT/AST <2 ULN.
   [0255] Albumin levels, prothrombin time (PT). International Normalized Ratio (INR) within normal range.
   [0256] Hematologic parameters within normal range
   [0257] Direct bilirubin <1.1 ULN.
   [0258] Lipase level <Grade 2
   [0259] Any laboratory abnormality ≥Grade 1 must be considered not clinically significant by the investigator at screening.
      Participants with Renal Impairment (Group 1 and Group 2) Must Meet the Following Additional Inclusion Criteria to be Enrolled in the Study:
[0260] 6. Must have stable renal function defined as a <20% change in serum creatinine concentrations between screening and Day −1.
[0261] 7. Have a creatinine clearance of <60 mL/min with the following classification based on eGFRcr as provided in Table or:
   [0262] Have an impaired renal function based on eGFRer as given below (eGFRcr computed with the online calculator on the CKD-EPI website (http://ckdepi.org/equations/gfrcalculator/) providing eGFR (in mL/min) by use of the CKD-EPIcr result.
      [0263] eGFRcr 30 to 59 mL/min for participants with moderate renal impairment.
      [0264] eGFRcr <30 mL/min for participants with severe renal impairment/ESRD, not on dialysis.
   [0265] Glomerular Filtration Rate will be calculated by the CKD-EPI equation.
[0266] 8. Have a hemoglobin above 8.0 mg/dL at screening.
[0267] 9. Participants with kidney disease and not on dialysis must meet the following additional inclusion criteria to be enrolled in the study: no significant change in renal function as evidenced by the serum creatinine values. Two samples for serum creatinine must be available before Day 1 (minimum of 7 days between samples) for the estimation of eGFRcr. A historical sample taken not more than 3 months prior to screening visit using the same laboratory can be used as first sample. In the very rare case where the 2 creatinine samples for determination of mean eGFRcr does not clearly allocate a participant to one of the renal-function groups (for example, when there is more than 20% difference between the 2 determined eGFR values, that is, the difference of the 2 values divided by the mean of the values is ≥20%), and in consideration of the participant's renal impairment history by the investigator, a third serum creatinine sample with a minimum of 7 days between samples may be taken, and the median of all three values will be used for classification.
[0268] 10. Participant must be medically stable on the basis of physical examination, medical history, vital signs (including blood pressure), and 12-lead ECG performed at screening. The abnormal results of the serum chemistry panel, hematology, or urinalysis are permitted as long as they are related to renal disease and the participant may be included only if the investigator judges the abnormalities or deviations from normal to be not clinically significant or to be appropriate and reasonable for the population under study. This determination must be recorded in the participant's source documents and initialed by the investigator.
[0269] 11. After being supine for 5 minutes, systolic blood pressure between 90 mmHg and 179 mmHg, inclusive; diastolic blood pressure between 60 mmHg and 100 mmHg, inclusive. Participants need to have stable blood pressure readings. If blood pressure is out of range, up to 2 repeated assessments are permitted. Additionally, participants must have a 12-lead ECG consistent with normal cardiac conduction and function for the population under the study including:
   [0270] Renal patients should not be clinically significant in the opinion of the investigator
   [0271] Pulse rate between 50 and 100 (inclusive) beats per minute
   [0272] QTc interval≤500 ms (corrected cf. Fridericia; QTcF)
   [0273] QRS interval of <120 ms
   [0274] PR interval <230 ms
[0275] 12. Laboratory parameters must be within:
   [0276] ALT/AST <2 ULN.
   [0277] Direct bilirubin <1.1 ULN.
   [0278] Lipase level <Grade 2
   [0279] In addition, any laboratory abnormality must be considered not clinically significant by the investigator at screening or caused by renal impairment.
[0280] 13. Concomitant medications should be stable for the previous 1 month and throughout the duration of the study.

### Weight

[0281] 14. Body mass index (BMI) (weight [kg]/height [m]²) between 18.0 and 38.0 kg/m² (inclusive), and body weight not less than 50 kg.

### Sex and Contraceptive/Barrier Requirements

[0282] 15. Male or female.
[0283] 16. Women, except for postmenopausal women, must have a negative highly sensitive serum (β-human chorionic gonadotropin [β-hCG]) at screening and urine (β-hCG) pregnancy test on Day −1.
[0284] 17. Contraceptive use by men or women should be consistent with local regulations regarding the use of contraceptive methods for participants participating in clinical studies.
[0285] 18. A woman must be either:
   [0286] a. Not of childbearing potential defined as:
      [0287] postmenopausal
      [0288] A postmenopausal state is defined as no menses for 12 months without an alternative medical cause. A high follicle stimulating hormone (FSH) level (40 IU L or mIU mL in the postmenopausal range) may be used to confirm a postmenopausal state in women without documentation of ovarian failure and not using hormonal contraception or hormonal replacement therapy, however in the absence of 12 months of amenorrhea, a single FSH measurement is insufficient.
      [0289] permanently sterile
      [0290] Permanent sterilization methods include hysterectomy, bilateral salpingectomy, bilateral tubal occlusion ligation procedures, and bilateral oophorectomy.
   [0291] b. Of childbearing potential and practicing a highly effective method of contraception (failure rate of <1% per year when used consistently and correctly) and agrees to remain on a highly effective method throughout the study and for at least 90 days after the administration of study drug.

### Other Inclusions

[0292] 19. Participants with kidney disease without dialysis using benzodiazepines, tricyclic antidepressants, and prescription opiates with a positive urine test for drugs prescribed by their physician may be included following prior discussion with the sponsor.
[0293] 20. Non-smoker or light smoker who smokes no more than 10 cigarettes, or 2 cigars, or 2 pipes of tobacco per day; willing to limit smoking for the period of confinement to 4 cigarettes or 1 cigar or 1 pipe of tobacco per day.
[0294] 21. Willing and able to adhere to the lifestyle restrictions specified in this protocol.
[0295] 22. Must remain at the study center from at least 10 hours before study drug administration until 72 hours after study drug administration (Day 4). Must agree to return to the study center for subsequent assessments until the end of the study.

### Exclusion Criteria

[0296] Any potential participant who meets any of the following criteria will be excluded from participating in the study:

### Type of Participant and Disease Characteristic

Any participants who meet any of the following criteria will be excluded from the study:
[0297] 1. Individuals who: are on a vegetarian diet or who take creatine supplements, have a non-standard muscle mass, such as, amputation, malnutrition, or muscle wasting, because these factors are not accounted for in the prediction equations for GFR (CKD-EPI).
   Participants with Renal Impairment, Who Meet any of the Following Additional Criteria, are to be Excluded from the Study:
[0298] 2. Have kidney disease, requiring dialysis.
[0299] 3. Evidence of clinically apparent concurrent disease based upon complete clinical laboratory testing, full physical examination, or medical history, except for controlled hypertension and those problems directly associated with the primary diagnosis of renal impairment.
[0300] 4. Any clinically significant laboratory abnormality as specified in inclusion criterion 5 for healthy participants and inclusion criterion 12 for participants with renal impairment, respectively.
[0301] 5. Any abnormality in medical history, physical examination, or ECG, that, in the opinion of the investigator, may affect the safety of the participant (eg, myocardial infarction, conduction defects [eg, QTc interval >500 msec], atrial or ventricular arrhythmia, coronary artery disease, congestive heart failure, valvular diseases, peripheral vascular disorders, stroke, hematological, pulmonary, neurological, hepatic, psychiatric, metabolic, or endocrine disturbances, or inadequate nutritional status.
[0302] 6. History of uric acid stone disease or have experience a severe gout attack within the past 12 months before study drug administration.
[0303] 7. Uncontrolled Type 1 or Type 2 diabetes.
[0304] 8. Renal transplants, systemic lupus erythematosus, or participant with malignancy.
[0305] 9. Moderate to severe uncontrolled hypertension, defined as diastolic blood pressure (BP) ≥105 mmHg or systolic BP ≥180 mmHg (Participants with stable, mild hypertension controlled by a constant regimen over the previous 2 months before study entry may be enrolled).

### Medical Conditions

[0306] 10. Clinically significant medical illness including (but not limited to) cardiac arrhythmias or other cardiac disease, hematologic disease, coagulation disorders (including any abnormal bleeding or blood dyscrasias), significant pulmonary disease, including bronchospastic respiratory disease, renal or hepatic insufficiency, thyroid disease, neurologic disease, infection, kidney or urinary tract disturbances, sleep apnea, myasthenia gravis, or any other illness that the investigator considers should exclude the participant or that could interfere with the interpretation of the study results. Participants may be entered in the study if they have controlled thyroid conditions, hyperlipidemia, controlled hypertension, impaired fasting glucose tolerance or Type 2 diabetes mellitus controlled with diet, and/or oral drug therapy and/or insulin.
[0307] 11. Clinically significant abnormal values for hematology, clinical chemistry, or urinalysis at screening or Day −1, as deemed appropriate by the investigator. Retesting of abnormal lab values that may lead to exclusion will be allowed once. Retesting will take place during an unscheduled visit in the screening phase.
[0308] 12. Clinically significant abnormal physical examination, vital signs, body temperature, or 12-lead ECG at screening or Day −1, as deemed appropriate by the investigator.
[0309] 13. Known allergies, hypersensitivity, or intolerance to the RNAi component.

### Prior/Concurrent Clinical Study Experience

[0310] 14. Received an experimental drug (including investigational vaccines) or used an experimental medical device within 1 month or within a period less than 10 times the drug's half-life, whichever is longer, before the administration of the study drug is scheduled.
   [0311] Note: Coronavirus disease-2019 (COVID-19) vaccines with local conditional marketing authorization or approval are allowed.
[0312] 15. Pregnant breast-feeding, or planning to become pregnant during the study.
[0313] 16. Plans to father a child while enrolled in the study or within 3 months after the administration of the study drug.
[0314] 17. Any condition for which, in the opinion of the investigator, participation would not be in the best interest of the participant (eg, compromise the well-being) or that could prevent, limit, or confound the protocol-specified assessments.

### Other Exclusions

[0315] 18. Inability to fast for 10 hours.
[0316] 19. Preplanned surgery or procedures that would interfere with the conduct of the study.
[0317] 20. Employee of the investigator or study site, with direct involvement in the proposed study or other studies under the direction of that investigator or study site, as well as family members of the employees or the investigator.
[0318] 21. Participants who test positive for hepatitis A antibody immunoglobulin M (IgM), hepatitis E virus IgM and immunoglobulin G (IgG) antibody, HBsAg, human immunodeficiency virus (HIV)-1 or HIV-2 antibody, or HCV antibody at screening will be excluded, unless in the latter case, participants with a positive HCV antibody test can be enrolled if they have negative HCV RNA at screening and documented negative HCV RNA at least 6 months prior to screening.
[0319] 22. History of drug abuse according to Diagnostic and Statistical Manual of Mental Disorders (5^{th} edition) (DSM-V) criteria within 6 months before screening or positive test result(s) for drugs of abuse (including barbiturates, alcohol, opioids, opiates, cocaine, cannabinoids, amphetamines, hallucinogens, and benzodiazepines) at screening and on Day −1.
[0320] 23. Positive test for alcohol or drugs of abuse per local standard practices.
[0321] 24. Donated blood or blood products or had substantial loss of blood (more than 500 mL) within 3 months before the first administration of study drug or intention to donate blood or blood products during the study.
[0322] 25. During the 6 weeks prior to baseline, have had any of the following:
   [0323] (a) confirmed SARS-COV-2 (COVID-19) infection (test positive), OR
   [0324] (b) suspected SARS-COV-2 infection (clinical features without documented test results), OR
   [0325] (c) close contact with a person with known or suspected SARS-COV-2 infection.
   [0326] Exception: Participants may be included with a documented negative result for a validated SARS-COV-2 test
      [0327] obtained at least 2 weeks after conditions (a), (b), (c) above (timed from resolution of key clinical features if present, eg, fever, cough, dyspnea) and before baseline study visit; and
      [0328] with absence of ALL conditions (a), (b), (c) above during the period between the negative test result and the baseline study visit or already received an approved COVID-19 vaccine or COVID-19 vaccine with local conditional marketing authorizations.

### Study Endpoints

[0329] The objectives and endpoints to be measured in the study are addressed in Table 8.

TABLE 8
Objectives and Endpoints

| | |
|---|---|
| Objectives | Endpoints |

Primary

| | |
|---|---|
| To evaluate the PK of a single SC dose of the | Plasma concentration-time profiles and PK |
| RNAi component in adult participants with | parameters of the first and second RNAi |
| renal impairment compared with healthy | agents comprising the RNAi component in |
| participants with normal renal function. | adult participants with renal impairment |
| | compared with corresponding measures in |
| | adult participants with normal renal function. |

Secondary

| | |
|---|---|
| To assess the safety and tolerability of | Number and grade of adverse events (AEs) |
| single-dose of the RNAi component in adult | and abnormalities in clinical laboratory tests |
| participants with renal impairment and | (including hematology, blood biochemistry, |
| healthy participants with normal renal | blood coagulation, urinalysis, and urine |
| function. | chemistry), electrocardiograms (ECGs), vital |
| | signs, and physical examinations. |

Exploratory

| | |
|---|---|
| To better characterize potential changes in | Estimated glomerular filtration rate |
| estimated glomerular filtration rate (eGFR) | calculations based on cystatin C or |
| creatinine calculated with the CKD-EPI | creatinine. |
| creatinine equation (eGFRcr) after a single | |
| dose of the RNAi component with additional | |
| assessment of eGFR cystatin C calculated | |
| with the CKD-EPI cystatin C equation | |
| (eGFRcysC) in adult participants with renal | |
| impairment and healthy participants with | |
| normal renal function. | |

What is claimed is:

1. A method of treating hepatitis infection, said method comprising administering to a subject in need thereof an effective amount of a pharmaceutical composition comprising an RNAi component having:
(i) a first RNAi agent comprising: an antisense strand comprising a nucleotide sequence of any one of the following: SEQ ID NO: 1, SEQ ID NO:2, SEQ ID NO:3, SEQ ID NO:4, SEQ ID NO: 5, SEQ ID NO:6, and SEQ ID NO:7 and a sense strand comprising a nucleotide sequence of any one of the following: SEQ ID NO:10, SEQ ID NO:11, SEQ ID NO:12, SEQ ID NO: 13, SEQ ID NO: 14, and SEQ ID NO:15; and
(ii) a second RNAi agent comprising: an antisense strand comprising a nucleotide sequence of any one of the following: SEQ ID NO:8 and SEQ ID NO:9, and a sense strand comprising a nucleotide sequence of any one of the following: SEQ ID NO:16, SEQ ID NO: 17, SEQ ID NO: 18, and SEQ ID NO:19;
wherein the subject has previously been determined to have a level of renal sufficiency selected from the group consisting of no renal impairment, mild renal impairment, moderate renal impairment, severe renal impairment and ESRD.

2. The method according to claim 1, wherein the subject is affected with renal impairment, more particularly with moderate or severe renal impairment.

3. The method of claim 2, wherein the subject has no kidney disease requiring a dialysis.

4. The method of claim 2 or 3, wherein the subject has an eGFRer of 30-59 mL/min or of 15-29 mL/min.

5. The method of claim 1, wherein the subject has no renal impairment and has normal renal function.

6. The method of claim 5, wherein the subject has an eGFRcr ≥90 ml/min.

7. The method of any one of claims 2 to 6, wherein the subject has an ALT/AST <2 ULN, a direct bilirubin <1.1 ULN and a lipase level <Grade 2.

8. The method according to any one of claim 1 or 7, wherein the subject is affected with hepatitis B virus (HBV) infection, more particularly with chronic HBV infection.

9. The method according to any one of claims 1 to 8, wherein the subject is a treatment naïve patient.

10. The method according to claim 9, wherein the subject is a treatment naïve HBeAg+ patient.

11. The method according to any one of claims 1 to 8, wherein the subject is a treatment-experienced patient, and wherein said treatment consists of administering nucleoside or nucleotide analogue(s) and/or IFN.

12. The method of any one of claims 1-11, wherein the hepatitis infection is Hepatitis B Virus (HBV) infection, with or without co-infection.

13. The method according to any one of claims 1-12, wherein the hepatitis infection is Hepatitis B Virus infection with viral co-infection, more particularly with Hepatitis D Virus co-infection.

14. The method according to any one of claims 1-13, wherein the hepatitis infection is Hepatitis B Virus infection without viral co-infection, more particularly without Hepatitis D Virus co-infection.

15. The method of any one of claims 1-14, wherein the first or the second RNAi agent comprises at least one modified nucleotide and/or at least one modified internucleoside linkage.

16. The method of claim 15, wherein at least 90% of the nucleotides in the first and the second RNAi agents are modified nucleotides.

17. The method of any one of claims 1-16, wherein the first or the second RNAi agent further comprises a targeting ligand that is conjugated to the first or the second RNAi agent.

18. The method of claim 17, wherein the targeting ligand comprises N-acetyl-galactosamine.

19. The method of claim 18, wherein the targeting ligand is selected from the group consisting of (NAG13), (NAG13)s, (NAG18), (NAG18)s, (NAG24), (NAG24)s, (NAG25), (NAG25)s, (NAG26), (NAG26)s, (NAG27), (NAG27)s, (NAG28), (NAG28)s, (NAG29), (NAG29)s, (NAG30), (NAG30)s, (NAG31), (NAG31)s, (NAG32), (NAG32)s, (NAG33), (NAG33)s, (NAG34), (NAG34)s, (NAG35), (NAG35)s, (NAG36), (NAG36)s, (NAG37), (NAG37)s, (NAG38), (NAG38)s, (NAG39), and (NAG39)s.

20. The method of claim 19, wherein the targeting ligand is (NAG25), (NAG25)s, (NAG31), (NAG31)s, (NAG37), or (NAG37)s.

21. The method of any one of claims 17-20, wherein the targeting ligand is conjugated to the sense strand of the first or the second RNAi agent.

22. The method of claim 21, wherein the targeting ligand is conjugated to the 5′ terminus of the sense stand of the first or the second RNAi agent.

23. The method of any one of claims 1-22, wherein the first and the second RNAi agents independently comprise a duplex selected from the group consisting of:
(a) an antisense strand comprising SEQ ID NO: 1 and a sense strand comprising SEQ ID NO: 10;
(b) an antisense strand comprising SEQ ID NO: 2 and a sense strand comprising SEQ ID NO: 11;
(c) an antisense strand comprising SEQ ID NO: 3 and a sense strand comprising SEQ ID NO: 11;
(d) an antisense strand comprising SEQ ID NO: 4 and a sense strand comprising SEQ ID NO: 12;
(e) an antisense strand comprising SEQ ID NO: 8 and a sense strand comprising SEQ ID NO: 16;
(f) an antisense strand comprising SEQ ID NO: 8 and a sense strand comprising SEQ ID NO: 17;
(g) an antisense strand comprising SEQ ID NO: 2 and a sense strand comprising SEQ ID NO: 12; and
(h) an antisense strand comprising SEQ ID NO: 8 and a sense strand comprising SEQ ID NO: 18.

24. The method of any one of claims 1-23, wherein the first and the second RNAi agents are each independently conjugated to a targeting ligand comprising N-acetyl-galactosamine, and the first and the second RNAi agents independently comprise a duplex selected from the group consisting of:
(a) an antisense strand comprising SEQ ID NO: 2 and a sense strand comprising SEQ ID NO: 11;
(b) an antisense strand comprising SEQ ID NO: 4 and a sense strand comprising SEQ ID NO: 12;
(c) an antisense strand comprising SEQ ID NO: 8 and a sense strand comprising SEQ ID NO: 16;
(d) an antisense strand comprising SEQ ID NO: 2 and a sense strand comprising SEQ ID NO: 13; and
(e) an antisense strand comprising SEQ ID NO: 8 and a sense strand comprising SEQ ID NO: 18.

25. The method of any one of claims 1-24, wherein the molar ratio of the first RNAi agent to the second RNAi agent by weight is in the range of about 1:2 to about 5:1.

26. The method of any one of claims 1-25, wherein the RNAi component is administered to the subject in a dose of about 40-1000 mg, more particularly about 40-250 mg, more particularly 40-200 mg, more particularly 100 mg or 200 mg, more particularly 200 mg.

27. The method of any one of claims 1-26, wherein the RNAi component is administered to the subject once monthly (i.e., Q4W) or at longer time intervals, such as once every 8 weeks (Q8W) or once every 12 weeks (Q12W).

28. The method of any one of claims 1-27, wherein the RNAi component is administered to the subject for a time period of 1 to 12 months, more particularly for 12 to 48 weeks.

29. The method of any one of claims 1-28, wherein the RNAi component is administered via subcutaneous injection.

30. The method of any one of claims 1-28, wherein the RNAi component is administered to the subject via intravenous or subcutaneous injection.

31. The method according to any of claims 1-30, further comprising administering an effective amount of at least one additional agent.

32. The method of claim 31, wherein the one additional agent is administered to the subject once a day, every other day, twice a week or weekly, more particularly weekly.

33. The method of claim 31 or 32, wherein the one additional agent is administered to the subject for a time period of 1 to 12 months, more particularly for 6 to 48 weeks, more particularly for 12 to 24 weeks.

34. The method of any one of claims 31 to 33, wherein the one additional agent is administered orally.

35. The method of any one of claims 31 to 34, wherein the RNAi component is administered simultaneously or sequentially with the one additional agent.

36. The method of any one of claims 31 to 34, wherein the RNAi component is administered separately from the one additional agent.

37. The method of claim 36, wherein the one additional agent is administered to the subject about six (6) months after the administration of the RNAi component has started.

38. The method of claim 36 or claim 37, wherein one additional agent is administered to the subject about six (6) months after the administration of the RNAi component has started, and wherein the one additional agent is administered to the subject for about six (6) months in total.

39. The method of any one of claims 31 to 38, wherein the effective amount the pharmaceutical composition comprising the RNAi component and the effective amount of the pharmaceutical composition comprising the one additional agent is administered to the subject for 10-96 weeks, more particularly 12-72 weeks, more particularly 12-60 weeks, more particularly 12-52 weeks, more particularly 48 weeks.

40. The method according to any one of claims 31 to 39, wherein the one additional agent is a nucleoside or nucleotide analogue.

41. The method of claim 40, wherein the nucleotide or nucleoside analogue is entecavir, tenofovir, disoproxil fumarate, tenofovir alafenamide, lamivudine, telbivudine, or a combination thereof.

42. The method according to claim 40, wherein the nucleoside or nucleotide analogue is selected from the group consisting of tenofovir, or a pharmaceutically acceptable salt or prodrug thereof, and entecavir, or a pharmaceutically acceptable salt thereof.

43. The method according to claim 40, wherein the nucleoside or nucleotide analogue is tenofovir or a prodrug thereof, in particular, tenofovir alafenamide, or tenofovir disoproxil fumarate.

44. The method of claim 40, wherein the nucleoside or nucleotide analogue is entecavir, and the entecavir is administered to the subject in a daily dose of about 0.1-5 mg.

45. The method of claim 40, wherein the nucleoside or nucleotide analogue is a prodrug of tenofovir, and the tenofovir is administered to the subject in a daily dose of about 5-50 mg of tenofovir alafenamide or about 200-500 mg of tenofovir disoproxil fumarate.

46. The method of claim 40, wherein the nucleoside or nucleotide analogue is lamuvidine, and the lamivudine is administered to the subject in a daily dose of about 100 mg, about 150 mg or about 300 mg.

47. The method of claim 40, wherein the nucleoside or nucleotide analogue is telbivudine, and the telbivudine is administered to the subject in a daily dose of about 600 mg.

48. The method of any one of claims 40 to 47, wherein the administration of the nucleoside or nucleotide analog is optionally being continued once the administration of the effective amount the pharmaceutical composition comprising the RNAi component is terminated.

49. The method according to any one of claims 31 to 38, wherein the at least one additional therapeutic agent selected from the group consisting of HBV combination drugs, HBV vaccines, HBV DNA polymerase inhibitors, immunomodulators, toll-like receptor (TLR) modulators, interferon alpha receptor ligands, IFN, IFNalpha, IFNalpha2a, pegylated IFNs, pegylated IFNalpha2a, hyaluronidase inhibitors, hepatitis b surface antigen (HBsAg) inhibitors, cytotoxic T-lymphocyte-associated protein 4 (ipi4) inhibitors, cyclophilin inhibitors, HBV viral entry inhibitors, antisense oligonucleotide targeting viral mRNA, short interfering RNAs (siRNA), antisense oligonucleotides (ASOs), Nucleic Acid Polymers (NAPs), S-antigen Transport-inhibiting Oligonucleotide Polymers (STOPs) and ddRNAi endonuclease modulators, ribonucleotide reductase inhibitors, HBV E antigen inhibitors, covalently closed circular DNA (cccDNA) inhibitors, famesoid X receptor agonists, HBV antibodies, CCR2 chemokine antagonists, thymosin agonists, cytokines, nucleoprotein modulators, retinoic acid-inducible gene 1 simulators, NOD2 stimulators, phosphatidylinositol 3-kinase (PI3K) inhibitors, indoleamine-2,3-dioxygenase (IDO) pathway inhibitors, PD-1 inhibitors, PD-L1 inhibitors, recombinant thymosin alpha-1, bruton's tyrosine kinase (BTK) inhibitors, KDM inhibitors, HBV replication inhibitors, Capsid Assembly Modulators (CAMs) arginase inhibitors, and other HBV drugs.

50. The method according to claim 49, further comprising administering a nucleoside or nucleotide analogue to the subject.

51. An RNAi component for use in the treatment of hepatitis, more particularly in the treatment of a Hepatitis B Virus (HBV) infection, more particularly a chronic HBV infection (CHB) with or without a viral co-infection, and/or in the treatment of a Hepatitis D Virus (HDV) infection, more particularly a chronic HDV infection, wherein the RNAi component (and/or the method of treatment) is (are) as defined in any one of claims 1-50.

The application's sequence listing, which the Patent Office published only in electronic form, follows.

SEQUENCE LISTING (325 sequences)

SEQ ID NO: 1 - RNA, 21 nt, synthetic construct
  source 1..21: mol_type = other RNA
  modified_base 1: mod_base = OTHER; note = 2'-O-methyladenosine-3'-phosphorothioate
  modified_base 2: mod_base = OTHER; note = 2'-fluoroguanosine-3'-phosphorothioate
  modified_base 3: mod_base = OTHER; note = 2'-O-methyladenosine-3'-phosphorothioate
  modified_base 4: mod_base = OTHER; note = 2'-fluoroadenosine-3'-phosphate
  modified_base 5: mod_base = OTHER; note = 2'-O-methyladenosine-3'-phosphate
  modified_base 6: mod_base = OTHER; note = 2'-fluoroadenosine-3'-phosphate
  modified_base 7: mod_base = OTHER; note = 2'-O-methyluridine-3'-phosphate
  modified_base 8: mod_base = OTHER; note = 2'-O-methyluridine-3'-phosphate
  modified_base 9: mod_base = OTHER; note = 2'-O-methylguanosine-3'-phosphate
  modified_base 10: mod_base = OTHER; note = 2'-O-methyladenosine-3'-phosphate
  modified_base 11: mod_base = OTHER; note = 2'-O-methylguanosine-3'-phosphate
  modified_base 12: mod_base = OTHER; note = 2'-fluoroadenosine-3'-phosphate
  modified_base 13: mod_base = OTHER; note = 2'-O-methylguanosine-3'-phosphate
  modified_base 14: mod_base = OTHER; note = 2'-fluoroadenosine-3'-phosphate
  modified_base 15: mod_base = OTHER; note = 2'-O-methyladenosine-3'-phosphate
  modified_base 16: mod_base = OTHER; note = 2'-fluoroguanosine-3'-phosphate
  modified_base 17: mod_base = OTHER; note = 2'-O-methyluridine-3'-phosphate
  modified_base 18: mod_base = OTHER; note = 2'-fluorocytidine-3'-phosphate
  modified_base 19: mod_base = OTHER; note = 2'-O-methylcytidine-3'-phosphate
  modified_base 20: mod_base = OTHER; note = 2'-fluoroadenosine-3'-phosporothioate
  modified_base 21: mod_base = OTHER; note = 2'-O-methylcytidine-3'-phosphate
agaaaattgagagaagtccac

SEQ ID NO: 2 - RNA, 21 nt, synthetic construct
  source 1..21: mol_type = other RNA
  modified_base 1: mod_base = OTHER; note = 2'-O-methyladenosine-3'-phosphorothioate
  modified_base 2: mod_base = OTHER; note = 2'-fluoroguanosine-3'-phosphorothioate
  modified_base 3: mod_base = OTHER; note = 2'-O-methyladenosine-3'-phosphorothioate
  modified_base 4: mod_base = OTHER; note = 2'-fluoroadenosine-3'-phosphate
  modified_base 5: mod_base = OTHER; note = 2'-O-methyladenosine-3'-phosphate
  modified_base 6: mod_base = OTHER; note = 2'-fluoroadenosine-3'-phosphate
  modified_base 7: mod_base = OTHER; note = 2'-O-methyluridine-3'-phosphate
  modified_base 8: mod_base = OTHER; note = 2'-fluorouridine-3'-phosphate
  modified_base 9: mod_base = OTHER; note = 2'-O-methylguanosine-3'-phosphate
  modified_base 10: mod_base = OTHER; note = 2'-fluoroadenosine-3'-phosphate
  modified_base 11: mod_base = OTHER; note = 2'-O-methylguanosine-3'-phosphate
  modified_base 12: mod_base = OTHER; note = 2'-fluoroadenosine-3'-phosphate
  modified_base 13: mod_base = OTHER; note = 2'-O-methylguanosine-3'-phosphate
  modified_base 14: mod_base = OTHER; note = 2'-fluoroadenosine-3'-phosphate
  modified_base 15: mod_base = OTHER; note = 2'-O-methyladenosine-3'-phosphate
  modified_base 16: mod_base = OTHER; note = 2'-fluoroguanosine-3'-phosphate
  modified_base 17: mod_base = OTHER; note = 2'-O-methyluridine-3'-phosphate
  modified_base 18: mod_base = OTHER; note = 2'-fluorocytidine-3'-phosphate
  modified_base 19: mod_base = OTHER; note = 2'-O-methylcytidine-3'-phosphate
  modified_base 20: mod_base = OTHER; note = 2'-O-methyladenosine-3'-phosphorothioate
  modified_base 21: mod_base = OTHER; note = 2'-O-methylcytidine-3'-phosphate
agaaaattgagagaagtccac

SEQ ID NO: 3 - RNA, 23 nt, synthetic construct
  source 1..23: mol_type = other RNA
  modified_base 1: mod_base = OTHER; note = 2'-O-methyladenosine-3'-phosphorothioate
  modified_base 2: mod_base = OTHER; note = 2'-fluoroguanosine-3'-phosphorothioate
  modified_base 3: mod_base = OTHER; note = 2'-O-methyladenosine-3'-phosphorothioate
  modified_base 4: mod_base = OTHER; note = 2'-fluoroadenosine-3'-phosphate
  modified_base 5: mod_base = OTHER; note = 2'-O-methyladenosine-3'-phosphate
  modified_base 6: mod_base = OTHER; note = 2'-fluoroadenosine-3'-phosphate
  modified_base 7: mod_base = OTHER; note = 2'-O-methyluridine-3'-phosphate
  modified_base 8: mod_base = OTHER; note = 2'-fluorouridine-3'-phosphate
  modified_base 9: mod_base = OTHER; note = 2'-O-methylguanosine-3'-phosphate
  modified_base 10: mod_base = OTHER; note = 2'-fluoroadenosine-3'-phosphate
  modified_base 11: mod_base = OTHER; note = 2'-O-methylguanosine-3'-phosphate
  modified_base 12: mod_base = OTHER; note = 2'-fluoroadenosine-3'-phosphate
  modified_base 13: mod_base = OTHER; note = 2'-O-methylguanosine-3'-phosphate
  modified_base 14: mod_base = OTHER; note = 2'-fluoroadenosine-3'-phosphate
  modified_base 15: mod_base = OTHER; note = 2'-O-methyladenosine-3'-phosphate
  modified_base 16: mod_base = OTHER; note = 2'-fluoroguanosine-3'-phosphate
  modified_base 17: mod_base = OTHER; note = 2'-O-methyluridine-3'-phosphate
  modified_base 18: mod_base = OTHER; note = 2'-fluorocytidine-3'-phosphate
  modified_base 19: mod_base = OTHER; note = 2'-O-methylcytidine-3'-phosphate
  modified_base 20: mod_base = OTHER; note = 2'-O-methyladenosine-3'-phosphate
  modified_base 21: mod_base = OTHER; note = 2'-O-methylcytidine-3'-phosphate
  modified_base 22: mod_base = OTHER; note = 2'-O-methyluridine-3'-phosphorothioate
  modified_base 23: mod_base = OTHER; note = 2'-O-methyluridine-3'-phosphate
agaaaattgagagaagtccactt

SEQ ID NO: 4 - RNA, 22 nt, synthetic construct
  source 1..22: mol_type = other RNA
  modified_base 1: mod_base = OTHER; note = 2'-O-methyladenosine-3'-phosphorothioate
  modified_base 2: mod_base = OTHER; note = 2'-fluoroguanosine-3'-phosphorothioate
  modified_base 3: mod_base = OTHER; note = 2'-O-methyladenosine-3'-phosphorothioate
  modified_base 4: mod_base = OTHER; note = 2'-fluoroadenosine-3'-phosphate
  modified_base 5: mod_base = OTHER; note = 2'-O-methyladenosine-3'-phosphate
  modified_base 6: mod_base = OTHER; note = 2'-fluoroadenosine-3'-phosphate
  modified_base 7: mod_base = OTHER; note = 2'-O-methyluridine-3'-phosphate
  modified_base 8: mod_base = OTHER; note = 2'-fluorouridine-3'-phosphate
  modified_base 9: mod_base = OTHER; note = 2'-O-methylguanosine-3'-phosphate
  modified_base 10: mod_base = OTHER; note = 2'-fluoroadenosine-3'-phosphate
  modified_base 11: mod_base = OTHER; note = 2'-O-methylguanosine-3'-phosphate
  modified_base 12: mod_base = OTHER; note = 2'-fluoroadenosine-3'-phosphate
  modified_base 13: mod_base = OTHER; note = 2'-O-methylguanosine-3'-phosphate
  modified_base 14: mod_base = OTHER; note = 2'-fluoroadenosine-3'-phosphate
  modified_base 15: mod_base = OTHER; note = 2'-O-methyladenosine-3'-phosphate
  modified_base 16: mod_base = OTHER; note = 2'-fluoroguanosine-3'-phosphate
  modified_base 17: mod_base = OTHER; note = 2'-O-methyluridine-3'-phosphate
  modified_base 18: mod_base = OTHER; note = 2'-fluorocytidine-3'-phosphate
  modified_base 19: mod_base = OTHER; note = 2'-O-methylcytidine-3'-phosphate
  modified_base 20: mod_base = OTHER; note = 2'-O-methyladenosine-3'-phosphate
  modified_base 21: mod_base = OTHER; note = 2'-O-methylcytidine-3'-phosphorothioate
  modified_base 22: mod_base = OTHER; note = 2'-O-methylcytidine-3'-phosphate
agaaaattgagagaagtccacc

SEQ ID NO: 5 - RNA, 21 nt, synthetic construct
  source 1..21: mol_type = other RNA
agaaaattgagagaagtccac

SEQ ID NO: 6 - RNA, 23 nt, synthetic construct
  source 1..23: mol_type = other RNA
agaaaattgagagaagtccactt

SEQ ID NO: 7 - RNA, 22 nt, synthetic construct
  source 1..22: mol_type = other RNA
agaaaattgagagaagtccacc

SEQ ID NO: 8 - RNA, 21 nt, synthetic construct
  source 1..21: mol_type = other RNA
  modified_base 1: mod_base = OTHER; note = 2'-O-methyluridine-3'-phosphorothioate
  modified_base 2: mod_base = OTHER; note = 2'-fluoroadenosine-3'-phosporothioate
  modified_base 3: mod_base = OTHER; note = 2'-O-methylcytidine-3'-phosphorothioate
  modified_base 4: mod_base = OTHER; note = 2'-fluorocytidine-3'-phosphate
  modified_base 5: mod_base = OTHER; note = 2'-O-methyladenosine-3'-phosphate
  modified_base 6: mod_base = OTHER; note = 2'-fluoroadenosine-3'-phosphate
  modified_base 7: mod_base = OTHER; note = 2'-O-methyluridine-3'-phosphate
  modified_base 8: mod_base = OTHER; note = 2'-fluorouridine-3'-phosphate
  modified_base 9: mod_base = OTHER; note = 2'-O-methyluridine-3'-phosphate
  modified_base 10: mod_base = OTHER; note = 2'-fluoroadenosine-3'-phosphate
  modified_base 11: mod_base = OTHER; note = 2'-O-methyluridine-3'-phosphate
  modified_base 12: mod_base = OTHER; note = 2'-fluoroguanosine-3'-phosphate
  modified_base 13: mod_base = OTHER; note = 2'-O-methylcytidine-3'-phosphate
  modified_base 14: mod_base = OTHER; note = 2'-fluorocytidine-3'-phosphate
  modified_base 15: mod_base = OTHER; note = 2'-O-methyluridine-3'-phosphate
  modified_base 16: mod_base = OTHER; note = 2'-fluoroadenosine-3'-phosphate
  modified_base 17: mod_base = OTHER; note = 2'-O-methylcytidine-3'-phosphate
  modified_base 18: mod_base = OTHER; note = 2'-fluoroadenosine-3'-phosphate
  modified_base 19: mod_base = OTHER; note = 2'-O-methylguanosine-3'-phosphate
  modified_base 20: mod_base = OTHER; note = 2'-O-methylcytidine-3'-phosphorothioate
  modified_base 21: mod_base = OTHER; note = 2'-O-methylguanosine-3'-phosphate
taccaatttatgcctacagcg

SEQ ID NO: 9 - RNA, 21 nt, synthetic construct
  source 1..21: mol_type = other RNA
taccaatttatgcctacagcg

SEQ ID NO: 10 - DNA, 22 bp, synthetic construct
  source 1..22: mol_type = other DNA
  modified_base 1: mod_base = OTHER; note 37-(((2R,3R,4R,5R,6R)-3-acetamido-4,5-diacetoxy-6-(acetoxym ethyl)tetrahydro-2H-pyran-2-yl)oxy)-23,28-bis((2-(2-(((2R,3 R,4R,5R,6R)-3-acetamido-4,5-diacetoxy-6-(acetoxymethyl)tetr ahydro-2H-pyran-2-yl)oxy)ethoxy)ethyl)carbamoyl)-21,26,31-t rioxo-3,6,9,12,15,18,35-heptaoxa-22,27,32-triazaheptatriaco ntyl phosphorothioate-2'-O-methylguanosine-3'-phosphorothioate
  modified_base 2: mod_base = OTHER; note = 2'-O-methyluridine-3'-phosphate
  modified_base 3: mod_base = OTHER; note = 2'-O-methylguanosine-3'-phosphate
  modified_base 4: mod_base = OTHER; note = 2'-O-methylguanosine-3'-phosphate
  modified_base 5: mod_base = OTHER; note = 2'-O-methyladenosine-3'-phosphate
  modified_base 6: mod_base = OTHER; note = 2'-O-methylcytidine-3'-phosphate
  modified_base 7: mod_base = OTHER; note = 2'-O-methyluridine-3'-phosphate
  modified_base 8: mod_base = OTHER; note = 2'-O-methyluridine-3'-phosphate
  modified_base 9: mod_base = OTHER; note = 2'-fluorocytidine-3'-phosphate
  modified_base 10: mod_base = OTHER; note = 2'-fluorouridine-3'-phosphate
  modified_base 11: mod_base = OTHER; note = 2'-fluorocytidine-3'-phosphate
  modified_base 12: mod_base = OTHER; note = 2'-O-methyluridine-3'-phosphate
  modified_base 13: mod_base = OTHER; note = 2'-O-methylcytidine-3'-phosphate
  modified_base 14: mod_base = OTHER; note = 2'-O-methyladenosine-3'-phosphate
  modified_base 15: mod_base = OTHER; note = 2'-O-methyladenosine-3'-phosphate
  modified_base 16: mod_base = OTHER; note = 2'-O-methyluridine-3'-phosphate
  modified_base 17: mod_base = OTHER; note = 2'-O-methyluridine-3'-phosphate
  modified_base 18: mod_base = OTHER; note = 2'-O-methyluridine-3'-phosphate
  modified_base 19: mod_base = OTHER; note = 2'-O-methyluridine-3'-phosphate
  modified_base 20: mod_base = OTHER; note = 2'-O-methylcytidine-3'-phosphate
  modified_base 21: mod_base = OTHER; note = 2'-O-methyluridine-3'-phosphorothioate
  modified_base 22: mod_base = OTHER; note = inverted (3'-3' linked) abasic deoxyribonucleotide
  misc_feature 1..21: note = RNA
  misc_feature 22: note = DNA
gtggacttctctcaattttctn

SEQ ID NO: 11 - DNA, 23 bp, synthetic construct
  source 1..23: mol_type = other DNA
  modified_base 1: mod_base = OTHER; note 4-((1,22-bis(((2R,3R,4R,5R,6R)-3-acetamido-4,5-diacetoxy-6- (acetoxymethyl)tetrahydro-2H-pyran-2-yl)oxy)-10-((2-(2-(((2 R,3R,4R,5R,6R)-3-acetamido-4,5-diacetoxy-6-(acetoxymethyl)t etrahydro-2H-pyran-2-yl)oxy)ethoxy)ethyl)carbamoyl)-7,12,16 -trioxo-3,20-dioxa-6,11,17-triazadocosan-15-yl)carbamoyl)cy clohexyl phosphorothioate-inverted (3'-3' linked) abasic deoxyribonucleotide-5'-phosphorothioate
  modified_base 2: mod_base = OTHER; note = 2'-O-methylguanosine-3'-phosphate
  modified_base 3: mod_base = OTHER; note = 2'-O-methyluridine-3'-phosphate
  modified_base 4: mod_base = OTHER; note = 2'-O-methylguanosine-3'-phosphate
  modified_base 5: mod_base = OTHER; note = 2'-O-methylguanosine-3'-phosphate
  modified_base 6: mod_base = OTHER; note = 2'-O-methyladenosine-3'-phosphate
  modified_base 7: mod_base = OTHER; note = 2'-O-methylcytidine-3'-phosphate
  modified_base 8: mod_base = OTHER; note = 2'-O-methyluridine-3'-phosphate
  modified_base 9: mod_base = OTHER; note = 2'-O-methyluridine-3'-phosphate
  modified_base 10: mod_base = OTHER; note = 2'-fluorocytidine-3'-phosphate
  modified_base 11: mod_base = OTHER; note = 2'-fluorouridine-3'-phosphate
  modified_base 12: mod_base = OTHER; note = 2'-fluorocytidine-3'-phosphate
  modified_base 13: mod_base = OTHER; note = 2'-O-methyluridine-3'-phosphate
  modified_base 14: mod_base = OTHER; note = 2'-O-methylcytidine-3'-phosphate
  modified_base 15: mod_base = OTHER; note = 2'-O-methyladenosine-3'-phosphate
  modified_base 16: mod_base = OTHER; note = 2'-O-methyladenosine-3'-phosphate
  modified_base 17: mod_base = OTHER; note = 2'-O-methyluridine-3'-phosphate
  modified_base 18: mod_base = OTHER; note = 2'-O-methyluridine-3'-phosphate
  modified_base 19: mod_base = OTHER; note = 2'-O-methyluridine-3'-phosphate
  modified_base 20: mod_base = OTHER; note = 2'-O-methyluridine-3'-phosphate
  modified_base 21: mod_base = OTHER; note = 2'-O-methylcytidine-3'-phosphate
  modified_base 22: mod_base = OTHER; note = 2'-O-methyluridine-3'-phosphorothioate
  modified_base 23: mod_base = OTHER; note = inverted (3'-3' linked) abasic deoxyribonucleotide
  misc_feature 1: note = DNA
  misc_feature 2..22: note = RNA
  misc_feature 23: note = DNA
ngtggacttctctcaattttctn

SEQ ID NO: 12 - DNA, 24 bp, synthetic construct
  source 1..24: mol_type = other DNA
  modified_base 1: mod_base = OTHER; note 4-((1,22-bis(((2R,3R,4R,5R,6R)-3-acetamido-4,5-diacetoxy-6- (acetoxymethyl)tetrahydro-2H-pyran-2-yl)oxy)-10-((2-(2-(((2 R,3R,4R,5R,6R)-3-acetamido-4,5-diacetoxy-6-(acetoxymethyl)t etrahydro-2H-pyran-2-yl)oxy)ethoxy)ethyl)carbamoyl)-7,12,16 -trioxo-3,20-dioxa-6,11,17-triazadocosan-15-yl)carbamoyl)cy clohexyl phosphorothioate-inverted (3'-3' linked) abasic deoxyribonucleotide-5'-phosphorothioate
  modified_base 2: mod_base = OTHER; note = 2'-O-methylguanosine-3'-phosphate
  modified_base 3: mod_base = OTHER; note = 2'-O-methylguanosine-3'-phosphate
  modified_base 4: mod_base = OTHER; note = 2'-O-methyluridine-3'-phosphate
  modified_base 5: mod_base = OTHER; note = 2'-O-methylguanosine-3'-phosphate
  modified_base 6: mod_base = OTHER; note = 2'-O-methylguanosine-3'-phosphate
  modified_base 7: mod_base = OTHER; note = 2'-O-methyladenosine-3'-phosphate
  modified_base 8: mod_base = OTHER; note = 2'-O-methylcytidine-3'-phosphate
  modified_base 9: mod_base = OTHER; note = 2'-O-methyluridine-3'-phosphate
  modified_base 10: mod_base = OTHER; note = 2'-O-methyluridine-3'-phosphate
  modified_base 11: mod_base = OTHER; note = 2'-fluorocytidine-3'-phosphate
  modified_base 12: mod_base = OTHER; note = 2'-fluorouridine-3'-phosphate
  modified_base 13: mod_base = OTHER; note = 2'-fluorocytidine-3'-phosphate
  modified_base 14: mod_base = OTHER; note = 2'-O-methyluridine-3'-phosphate
  modified_base 15: mod_base = OTHER; note = 2'-O-methylcytidine-3'-phosphate
  modified_base 16: mod_base = OTHER; note = 2'-O-methyladenosine-3'-phosphate
  modified_base 17: mod_base = OTHER; note = 2'-O-methyladenosine-3'-phosphate
  modified_base 18: mod_base = OTHER; note = 2'-O-methyluridine-3'-phosphate
  modified_base 19: mod_base = OTHER; note = 2'-O-methyluridine-3'-phosphate
  modified_base 20: mod_base = OTHER; note = 2'-O-methyluridine-3'-phosphate
  modified_base 21: mod_base = OTHER; note = 2'-O-methyluridine-3'-phosphate
  modified_base 22: mod_base = OTHER; note = 2'-O-methylcytidine-3'-phosphate
  modified_base 23: mod_base = OTHER; note = 2'-O-methyluridine-3'-phosphorothioate
  modified_base 24: mod_base = OTHER; note = inverted (3'-3' linked) abasic deoxyribonucleotide
  misc_feature 1: note = DNA
  misc_feature 2..23: note = RNA
  misc_feature 24: note = DNA
nggtggacttctctcaattttctn

SEQ ID NO: 13 - DNA, 23 bp, synthetic construct
  source 1..23: mol_type = other DNA
  modified_base 1: mod_base = OTHER; note 37-(((2R,3R,4R,5R,6R)-3-acetamido-4,5-diacetoxy-6-(acetoxym ethyl)tetrahydro-2H-pyran-2-yl)oxy)-23,28-bis((2-(2-(((2R,3 R,4R,5R,6R)-3-acetamido-4,5-diacetoxy-6-(acetoxymethyl)tetr ahydro-2H-pyran-2-yl)oxy)ethoxy)ethyl)carbamoyl)-21,26,31-t rioxo-3,6,9,12,15,18,35-heptaoxa-22,27,32-triazaheptatriaco ntyl phosphorothioate-inverted (3'-3' linked) abasic deoxyribonucleotide-5'-phosphorothioate
  modified_base 2: mod_base = OTHER; note = 2'-O-methylguanosine-3'-phosphate
  modified_base 3: mod_base = OTHER; note = 2'-O-methyluridine-3'-phosphate
  modified_base 4: mod_base = OTHER; note = 2'-O-methylguanosine-3'-phosphate
  modified_base 5: mod_base = OTHER; note = 2'-O-methylguanosine-3'-phosphate
  modified_base 6: mod_base = OTHER; note = 2'-O-methyladenosine-3'-phosphate
  modified_base 7: mod_base = OTHER; note = 2'-O-methylcytidine-3'-phosphate
  modified_base 8: mod_base = OTHER; note = 2'-O-methyluridine-3'-phosphate
  modified_base 9: mod_base = OTHER; note = 2'-O-methyluridine-3'-phosphate
  modified_base 10: mod_base = OTHER; note = 2'-fluorocytidine-3'-phosphate
  modified_base 11: mod_base = OTHER; note = 2'-fluorouridine-3'-phosphate
  modified_base 12: mod_base = OTHER; note = 2'-fluorocytidine-3'-phosphate
  modified_base 13: mod_base = OTHER; note = 2'-O-methyluridine-3'-phosphate
  modified_base 14: mod_base = OTHER; note = 2'-O-methylcytidine-3'-phosphate
  modified_base 15: mod_base = OTHER; note = 2'-O-methyladenosine-3'-phosphate
  modified_base 16: mod_base = OTHER; note = 2'-O-methyladenosine-3'-phosphate
  modified_base 17: mod_base = OTHER; note = 2'-O-methyluridine-3'-phosphate
  modified_base 18: mod_base = OTHER; note = 2'-O-methyluridine-3'-phosphate
  modified_base 19: mod_base = OTHER; note = 2'-O-methyluridine-3'-phosphate
  modified_base 20: mod_base = OTHER; note = 2'-O-methyluridine-3'-phosphate
  modified_base 21: mod_base = OTHER; note = 2'-O-methylcytidine-3'-phosphate
  modified_base 22: mod_base = OTHER; note = 2'-O-methyluridine-3'-phosphorothioate
  modified_base 23: mod_base = OTHER; note = inverted (3'-3' linked) abasic deoxyribonucleotide
  misc_feature 1: note = DNA
  misc_feature 2..22: note = RNA
  misc_feature 23: note = DNA
ngtggacttctctcaattttctn

SEQ ID NO: 14 - RNA, 21 nt, synthetic construct
  source 1..21: mol_type = other RNA
gtggacttctctcaattttct

SEQ ID NO: 15 - RNA, 22 nt, synthetic construct
  source 1..22: mol_type = other RNA
ggtggacttctctcaattttct

SEQ ID NO: 16 - DNA, 23 bp, synthetic construct
  source 1..23: mol_type = other DNA
  modified_base 1: mod_base = OTHER; note 4-((1,22-bis(((2R,3R,4R,5R,6R)-3-acetamido-4,5-diacetoxy-6- (acetoxymethyl)tetrahydro-2H-pyran-2-yl)oxy)-10-((2-(2-(((2 R,3R,4R,5R,6R)-3-acetamido-4,5-diacetoxy-6-(acetoxymethyl)t etrahydro-2H-pyran-2-yl)oxy)ethoxy)ethyl)carbamoyl)-7,12,16 -trioxo-3,20-dioxa-6,11,17-triazadocosan-15-yl)carbamoyl)cy clohexyl phosphorothioate-inverted (3'-3' linked) abasic deoxyribonucleotide-5'-phosphorothioate
  modified_base 2: mod_base = OTHER; note = 2'-O-methylcytidine-3'-phosphate
  modified_base 3: mod_base = OTHER; note = 2'-O-methylguanosine-3'-phosphate
  modified_base 4: mod_base = OTHER; note = 2'-O-methylcytidine-3'-phosphate
  modified_base 5: mod_base = OTHER; note = 2'-O-methyluridine-3'-phosphate
  modified_base 6: mod_base = OTHER; note = 2'-O-methylguanosine-3'-phosphate
  modified_base 7: mod_base = OTHER; note = 2'-O-methyluridine-3'-phosphate
  modified_base 8: mod_base = OTHER; note = 2'-O-methyladenosine-3'-phosphate
  modified_base 9: mod_base = OTHER; note = 2'-O-methylguanosine-3'-phosphate
  modified_base 10: mod_base = OTHER; note = 2'-fluoroguanosine-3'-phosphate
  modified_base 11: mod_base = OTHER; note = 2'-fluorocytidine-3'-phosphate
  modified_base 12: mod_base = OTHER; note = 2'-fluoroadenosine-3'-phosphate
  modified_base 13: mod_base = OTHER; note = 2'-O-methyluridine-3'-phosphate
  modified_base 14: mod_base = OTHER; note = 2'-O-methyladenosine-3'-phosphate
  modified_base 15: mod_base = OTHER; note = 2'-O-methyladenosine-3'-phosphate
  modified_base 16: mod_base = OTHER; note = 2'-O-methyladenosine-3'-phosphate
  modified_base 17: mod_base = OTHER; note = 2'-O-methyluridine-3'-phosphate
  modified_base 18: mod_base = OTHER; note = 2'-O-methyluridine-3'-phosphate
  modified_base 19: mod_base = OTHER; note = 2'-O-methylguanosine-3'-phosphate
  modified_base 20: mod_base = OTHER; note = 2'-O-methylguanosine-3'-phosphate
  modified_base 21: mod_base = OTHER; note = 2'-O-methyluridine-3'-phosphate
  modified_base 22: mod_base = OTHER; note = 2'-O-methyladenosine-3'-phosphorothioate
  modified_base 23: mod_base = OTHER; note = inverted (3'-3' linked) abasic deoxyribonucleotide
  misc_feature 1: note = DNA
  misc_feature 2..22: note = RNA
  misc_feature 23: note = DNA
ncgctgtaggcataaattggtan

SEQ ID NO: 17 - DNA, 22 bp, synthetic construct
  source 1..22: mol_type = other DNA
  modified_base 1: mod_base = OTHER; note 4-((1,22-bis(((2R,3R,4R,5R,6R)-3-acetamido-4,5-diacetoxy-6- (acetoxymethyl)tetrahydro-2H-pyran-2-yl)oxy)-10-((2-(2-(((2 R,3R,4R,5R,6R)-3-acetamido-4,5-diacetoxy-6-(acetoxymethyl)t etrahydro-2H-pyran-2-yl)oxy)ethoxy)ethyl)carbamoyl)-7,12,16 -trioxo-3,20-dioxa-6,11,17-triazadocosan-15-yl)carbamoyl)cy clohexyl phosphate-2'-O-methylcytidine-3'-phosphorothioate
  modified_base 2: mod_base = OTHER; note = 2'-O-methylguanosine-3'-phosphate
  modified_base 3: mod_base = OTHER; note = 2'-O-methylcytidine-3'-phosphate
  modified_base 4: mod_base = OTHER; note = 2'-O-methyluridine-3'-phosphate
  modified_base 5: mod_base = OTHER; note = 2'-O-methylguanosine-3'-phosphate
  modified_base 6: mod_base = OTHER; note = 2'-O-methyluridine-3'-phosphate
  modified_base 7: mod_base = OTHER; note = 2'-O-methyladenosine-3'-phosphate
  modified_base 8: mod_base = OTHER; note = 2'-O-methylguanosine-3'-phosphate
  modified_base 9: mod_base = OTHER; note = 2'-fluoroguanosine-3'-phosphate
  modified_base 10: mod_base = OTHER; note = 2'-fluorocytidine-3'-phosphate
  modified_base 11: mod_base = OTHER; note = 2'-fluoroadenosine-3'-phosphate
  modified_base 12: mod_base = OTHER; note = 2'-O-methyluridine-3'-phosphate
  modified_base 13: mod_base = OTHER; note = 2'-O-methyladenosine-3'-phosphate
  modified_base 14: mod_base = OTHER; note = 2'-O-methyladenosine-3'-phosphate
  modified_base 15: mod_base = OTHER; note = 2'-O-methyladenosine-3'-phosphate
  modified_base 16: mod_base = OTHER; note = 2'-O-methyluridine-3'-phosphate
  modified_base 17: mod_base = OTHER; note = 2'-O-methyluridine-3'-phosphate
  modified_base 18: mod_base = OTHER; note = 2'-O-methylguanosine-3'-phosphate
  modified_base 19: mod_base = OTHER; note = 2'-O-methylguanosine-3'-phosphate
  modified_base 20: mod_base = OTHER; note = 2'-O-methyluridine-3'-phosphate
  modified_base 21: mod_base = OTHER; note = 2'-O-methyladenosine-3'-phosphorothioate
  modified_base 22: mod_base = OTHER; note = inverted (3'-3' linked) abasic deoxyribonucleotide
  misc_feature 1..21: note = RNA
  misc_feature 22: note = DNA
cgctgtaggcataaattggtan

SEQ ID NO: 18 - DNA, 23 bp, synthetic construct
  source 1..23: mol_type = other DNA
  modified_base 1: mod_base = OTHER; note 37-(((2R,3R,4R,5R,6R)-3-acetamido-4,5-diacetoxy-6-(acetoxym ethyl)tetrahydro-2H-pyran-2-yl)oxy)-23,28-bis((2-(2-(((2R,3 R,4R,5R,6R)-3-acetamido-4,5-diacetoxy-6-(acetoxymethyl)tetr ahydro-2H-pyran-2-yl)oxy)ethoxy)ethyl)carbamoyl)-21,26,31-t rioxo-3,6,9,12,15,18,35-heptaoxa-22,27,32-triazaheptatriaco ntyl phosphorothioate-inverted (3'-3' linked) abasic deoxyribonucleotide-5'-phosphorothioate
  modified_base 2: mod_base = OTHER; note = 2'-O-methylcytidine-3'-phosphate
  modified_base 3: mod_base = OTHER; note = 2'-O-methylguanosine-3'-phosphate
  modified_base 4: mod_base = OTHER; note = 2'-O-methylcytidine-3'-phosphate
  modified_base 5: mod_base = OTHER; note = 2'-O-methyluridine-3'-phosphate
  modified_base 6: mod_base = OTHER; note = 2'-O-methylguanosine-3'-phosphate
  modified_base 7: mod_base = OTHER; note = 2'-O-methyluridine-3'-phosphate
  modified_base 8: mod_base = OTHER; note = 2'-O-methyladenosine-3'-phosphate
  modified_base 9: mod_base = OTHER; note = 2'-O-methylguanosine-3'-phosphate
  modified_base 10: mod_base = OTHER; note = 2'-fluoroguanosine-3'-phosphate
  modified_base 11: mod_base = OTHER; note = 2'-fluorocytidine-3'-phosphate
  modified_base 12: mod_base = OTHER; note = 2'-fluoroadenosine-3'-phosphate
  modified_base 13: mod_base = OTHER; note = 2'-O-methyluridine-3'-phosphate
  modified_base 14: mod_base = OTHER; note = 2'-O-methyladenosine-3'-phosphate
  modified_base 15: mod_base = OTHER; note = 2'-O-methyladenosine-3'-phosphate
  modified_base 16: mod_base = OTHER; note = 2'-O-methyladenosine-3'-phosphate
  modified_base 17: mod_base = OTHER; note = 2'-O-methyluridine-3'-phosphate
  modified_base 18: mod_base = OTHER; note = 2'-O-methyluridine-3'-phosphate
  modified_base 19: mod_base = OTHER; note = 2'-O-methylguanosine-3'-phosphate
  modified_base 20: mod_base = OTHER; note = 2'-O-methylguanosine-3'-phosphate
  modified_base 21: mod_base = OTHER; note = 2'-O-methyluridine-3'-phosphate
  modified_base 22: mod_base = OTHER; note = 2'-O-methyladenosine-3'-phosphorothioate
  modified_base 23: mod_base = OTHER; note = inverted (3'-3' linked) abasic deoxyribonucleotide
  misc_feature 1: note = DNA
  misc_feature 2..22: note = RNA
  misc_feature 23: note = DNA
ncgctgtaggcataaattggtan

SEQ ID NO: 19 - RNA, 21 nt, synthetic construct
  source 1..21: mol_type = other RNA
cgctgtaggcataaattggta

SEQ ID NO: 20-60 - skipped (41 entries)

SEQ ID NO: 61 - RNA, 26 nt, synthetic construct
  source 1..26: mol_type = other RNA
  modified_base 1: mod_base = OTHER; note = 2'-O-methyluridine-3'-phosphorothioate
  modified_base 2: mod_base = OTHER; note = 2'-fluoroadenosine-3'-phosporothioate
  modified_base 3: mod_base = OTHER; note = 2'-O-methylcytidine-3'-phosphate
  modified_base 4: mod_base = OTHER; note = 2'-fluorocytidine-3'-phosphate
  modified_base 5: mod_base = OTHER; note = 2'-O-methyladenosine-3'-phosphate
  modified_base 6: mod_base = OTHER; note = 2'-fluoroadenosine-3'-phosphate
  modified_base 7: mod_base = OTHER; note = 2'-O-methyluridine-3'-phosphate
  modified_base 8: mod_base = OTHER; note = 2'-fluorouridine-3'-phosphate
  modified_base 9: mod_base = OTHER; note = 2'-O-methyluridine-3'-phosphate
  modified_base 10: mod_base = OTHER; note = 2'-fluoroadenosine-3'-phosphate
  modified_base 11: mod_base = OTHER; note = 2'-O-methyluridine-3'-phosphate
  modified_base 12: mod_base = OTHER; note = 2'-fluoroguanosine-3'-phosphate
  modified_base 13: mod_base = OTHER; note = 2'-O-methylcytidine-3'-phosphate
  modified_base 14: mod_base = OTHER; note = 2'-fluorocytidine-3'-phosphate
  modified_base 15: mod_base = OTHER; note = 2'-O-methyluridine-3'-phosphate
  modified_base 16: mod_base = OTHER; note = 2'-fluoroadenosine-3'-phosphate
  modified_base 17: mod_base = OTHER; note = 2'-O-methylcytidine-3'-phosphate
  modified_base 18: mod_base = OTHER; note = 2'-fluoroadenosine-3'-phosphate
  modified_base 19: mod_base = OTHER; note = 2'-O-methylguanosine-3'-phosphate
  modified_base 20: mod_base = OTHER; note = 2'-fluoroguanosine-3'-phosphate
  modified_base 21: mod_base = OTHER; note = 2'-O-methylcytidine-3'-phosphate
  modified_base 22: mod_base = OTHER; note = 2'-O-methylcytidine-3'-phosphorothioate
  modified_base 23: mod_base = OTHER; note = 2'-O-methyluridine-3'-phosphorothioate
  modified_base 24: mod_base = OTHER; note = 2'-O-methyluridine-3'-phosphate
  modified_base 26: mod_base = OTHER; note = 2'-O-methyluridine-3'-phosphate
taccaatttatgcctacaggccttat

SEQ ID NO: 62 - RNA, 23 nt, synthetic construct
  source 1..23: mol_type = other RNA
  modified_base 1: mod_base = OTHER; note = 2'-O-methyluridine-3'-phosphorothioate
  modified_base 2: mod_base = OTHER; note = 2'-fluoroadenosine-3'-phosporothioate
  modified_base 3: mod_base = OTHER; note = 2'-O-methylcytidine-3'-phosphate
  modified_base 4: mod_base = OTHER; note = 2'-fluorocytidine-3'-phosphate
  modified_base 5: mod_base = OTHER; note = 2'-O-methyladenosine-3'-phosphate
  modified_base 6: mod_base = OTHER; note = 2'-fluoroadenosine-3'-phosphate
  modified_base 7: mod_base = OTHER; note = 2'-O-methyluridine-3'-phosphate
  modified_base 8: mod_base = OTHER; note = 2'-fluorouridine-3'-phosphate
  modified_base 9: mod_base = OTHER; note = 2'-O-methyluridine-3'-phosphate
  modified_base 10: mod_base = OTHER; note = 2'-fluoroadenosine-3'-phosphate
  modified_base 11: mod_base = OTHER; note = 2'-O-methyluridine-3'-phosphate
  modified_base 12: mod_base = OTHER; note = 2'-fluoroguanosine-3'-phosphate
  modified_base 13: mod_base = OTHER; note = 2'-O-methylcytidine-3'-phosphate
  modified_base 14: mod_base = OTHER; note = 2'-fluorocytidine-3'-phosphate
  modified_base 15: mod_base = OTHER; note = 2'-O-methyluridine-3'-phosphate
  modified_base 16: mod_base = OTHER; note = 2'-fluoroadenosine-3'-phosphate
  modified_base 17: mod_base = OTHER; note = 2'-O-methylcytidine-3'-phosphate
  modified_base 18: mod_base = OTHER; note = 2'-fluoroadenosine-3'-phosphate
  modified_base 19: mod_base = OTHER; note = 2'-O-methylguanosine-3'-phosphate
  modified_base 20: mod_base = OTHER; note = 2'-fluoroguanosine-3'-phosphate
  modified_base 21: mod_base = OTHER; note = 2'-O-methylcytidine-3'-phosphorothioate
  modified_base 22: mod_base = OTHER; note = 2'-O-methylcytidine-3'-phosphorothioate
  modified_base 23: mod_base = OTHER; note = 2'-O-methyluridine-3'-phosphate
taccaatttatgcctacaggcct

SEQ ID NO: 63 - RNA, 23 nt, synthetic construct
  source 1..23: mol_type = other RNA
  modified_base 1: mod_base = OTHER; note = 2'-O-methyluridine-3'-phosphorothioate
  modified_base 2: mod_base = OTHER; note = 2'-fluoroadenosine-3'-phosporothioate
  modified_base 3: mod_base = OTHER; note = 2'-O-methylcytidine-3'-phosphorothioate
  modified_base 4: mod_base = OTHER; note = 2'-fluorocytidine-3'-phosphate
  modified_base 5: mod_base = OTHER; note = 2'-O-methyladenosine-3'-phosphate
  modified_base 6: mod_base = OTHER; note = 2'-fluoroadenosine-3'-phosphate
  modified_base 7: mod_base = OTHER; note = 2'-O-methyluridine-3'-phosphate
  modified_base 8: mod_base = OTHER; note = 2'-fluorouridine-3'-phosphate
  modified_base 9: mod_base = OTHER; note = 2'-O-methyluridine-3'-phosphate
  modified_base 10: mod_base = OTHER; note = 2'-fluoroadenosine-3'-phosphate
  modified_base 11: mod_base = OTHER; note = 2'-O-methyluridine-3'-phosphate
  modified_base 12: mod_base = OTHER; note = 2'-fluoroguanosine-3'-phosphate
  modified_base 13: mod_base = OTHER; note = 2'-O-methylcytidine-3'-phosphate
  modified_base 14: mod_base = OTHER; note = 2'-fluorocytidine-3'-phosphate
  modified_base 15: mod_base = OTHER; note = 2'-O-methyluridine-3'-phosphate
  modified_base 16: mod_base = OTHER; note = 2'-fluoroadenosine-3'-phosphate
  modified_base 17: mod_base = OTHER; note = 2'-O-methylcytidine-3'-phosphate
  modified_base 18: mod_base = OTHER; note = 2'-fluoroadenosine-3'-phosphate
  modified_base 19: mod_base = OTHER; note = 2'-O-methylguanosine-3'-phosphate
  modified_base 20: mod_base = OTHER; note = 2'-fluoroguanosine-3'-phosphate
  modified_base 21: mod_base = OTHER; note = 2'-O-methylcytidine-3'-phosphate
  modified_base 22: mod_base = OTHER; note = 2'-O-methylcytidine-3'-phosphorothioate
  modified_base 23: mod_base = OTHER; note = 2'-O-methyluridine-3'-phosphate
taccaatttatgcctacaggcct

SEQ ID NO: 64 - RNA, 21 nt, synthetic construct
  source 1..21: mol_type = other RNA
  modified_base 1: mod_base = OTHER; note = 2'-O-methyluridine-3'-phosphorothioate
  modified_base 2: mod_base = OTHER; note = 2'-fluoroadenosine-3'-phosporothioate
  modified_base 3: mod_base = OTHER; note = 2'-O-methylcytidine-3'-phosphorothioate
  modified_base 4: mod_base = OTHER; note = 2'-fluorocytidine-3'-phosphate
  modified_base 5: mod_base = OTHER; note = 2'-O-methyladenosine-3'-phosphate
  modified_base 6: mod_base = OTHER; note = 2'-fluoroadenosine-3'-phosphate
  modified_base 7: mod_base = OTHER; note = 2'-O-methyluridine-3'-phosphate
  modified_base 8: mod_base = OTHER; note = 2'-fluorouridine-3'-phosphate
  modified_base 9: mod_base = OTHER; note = 2'-O-methyluridine-3'-phosphate
  modified_base 10: mod_base = OTHER; note = 2'-fluoroadenosine-3'-phosphate
  modified_base 11: mod_base = OTHER; note = 2'-O-methyluridine-3'-phosphate
  modified_base 12: mod_base = OTHER; note = 2'-fluoroguanosine-3'-phosphate
  modified_base 13: mod_base = OTHER; note = 2'-O-methylcytidine-3'-phosphate
  modified_base 14: mod_base = OTHER; note = 2'-fluorocytidine-3'-phosphate
  modified_base 15: mod_base = OTHER; note = 2'-O-methyluridine-3'-phosphate
  modified_base 16: mod_base = OTHER; note = 2'-fluoroadenosine-3'-phosphate
  modified_base 17: mod_base = OTHER; note = 2'-O-methylcytidine-3'-phosphate
  modified_base 18: mod_base = OTHER; note = 2'-fluoroadenosine-3'-phosphate
  modified_base 19: mod_base = OTHER; note = 2'-O-methylguanosine-3'-phosphate
  modified_base 20: mod_base = OTHER; note = 2'-fluoroguanosine-3'-phosphorothioate
  modified_base 21: mod_base = OTHER; note = 2'-O-methylcytidine-3'-phosphate
taccaatttatgcctacaggc

SEQ ID NO: 65 - RNA, 21 nt, synthetic construct
  source 1..21: mol_type = other RNA
  modified_base 1: mod_base = OTHER; note = 2'-O-methyluridine-3'-phosphorothioate
  modified_base 2: mod_base = OTHER; note = 2'-fluoroguanosine-3'-phosphorothioate
  modified_base 3: mod_base = OTHER; note = 2'-O-methyluridine-3'-phosphate
  modified_base 4: mod_base = OTHER; note = 2'-O-methylguanosine-3'-phosphate
  modified_base 5: mod_base = OTHER; note = 2'-O-methyladenosine-3'-phosphate
  modified_base 6: mod_base = OTHER; note = 2'-fluoroadenosine-3'-phosphate
  modified_base 7: mod_base = OTHER; note = 2'-O-methylguanosine-3'-phosphate
  modified_base 8: mod_base = OTHER; note = 2'-fluorocytidine-3'-phosphate
  modified_base 9: mod_base = OTHER; note = 2'-fluoroguanosine-3'-phosphate
  modified_base 10: mod_base = OTHER; note = 2'-O-methyladenosine-3'-phosphate
  modified_base 11: mod_base = OTHER; note = 2'-O-methyladenosine-3'-phosphate
  modified_base 12: mod_base = OTHER; note = 2'-O-methylguanosine-3'-phosphate
  modified_base 13: mod_base = OTHER; note = 2'-O-methyluridine-3'-phosphate
  modified_base 14: mod_base = OTHER; note = 2'-fluoroguanosine-3'-phosphate
  modified_base 15: mod_base = OTHER; note = 2'-O-methylcytidine-3'-phosphate
  modified_base 16: mod_base = OTHER; note = 2'-fluoroadenosine-3'-phosphate
  modified_base 17: mod_base = OTHER; note = 2'-O-methylcytidine-3'-phosphate
  modified_base 18: mod_base = OTHER; note = 2'-O-methyladenosine-3'-phosphate
  modified_base 19: mod_base = OTHER; note = 2'-O-methylcytidine-3'-phosphorothioate
  modified_base 20: mod_base = OTHER; note = 2'-O-methyluridine-3'-phosphorothioate
  modified_base 21: mod_base = OTHER; note = 2'-O-methyluridine-3'-phosphate
tgtgaagcgaagtgcacactt

SEQ ID NO: 66 - RNA, 26 nt, synthetic construct
  source 1..26: mol_type = other RNA
  modified_base 1: mod_base = OTHER; note = 2'-O-methyluridine-3'-phosphorothioate
  modified_base 2: mod_base = OTHER; note = 2'-fluoroadenosine-3'-phosporothioate
  modified_base 3: mod_base = OTHER; note = 2'-O-methylcytidine-3'-phosphate
  modified_base 4: mod_base = OTHER; note = 2'-fluorocytidine-3'-phosphate
  modified_base 5: mod_base = OTHER; note = 2'-O-methyladenosine-3'-phosphate
  modified_base 6: mod_base = OTHER; note = 2'-fluoroadenosine-3'-phosphate
  modified_base 7: mod_base = OTHER; note = 2'-O-methyluridine-3'-phosphate
  modified_base 8: mod_base = OTHER; note = 2'-fluorouridine-3'-phosphate
  modified_base 9: mod_base = OTHER; note = 2'-O-methyluridine-3'-phosphate
  modified_base 10: mod_base = OTHER; note = 2'-fluoroadenosine-3'-phosphate
  modified_base 11: mod_base = OTHER; note = 2'-O-methyluridine-3'-phosphate
  modified_base 12: mod_base = OTHER; note = 2'-fluoroguanosine-3'-phosphate
  modified_base 13: mod_base = OTHER; note = 2'-O-methylcytidine-3'-phosphate
  modified_base 14: mod_base = OTHER; note = 2'-fluorocytidine-3'-phosphate
  modified_base 15: mod_base = OTHER; note = 2'-O-methyluridine-3'-phosphate
  modified_base 16: mod_base = OTHER; note = 2'-fluoroadenosine-3'-phosphate
  modified_base 17: mod_base = OTHER; note = 2'-O-methylcytidine-3'-phosphate
  modified_base 18: mod_base = OTHER; note = 2'-fluoroadenosine-3'-phosphate
  modified_base 19: mod_base = OTHER; note = 2'-O-methylguanosine-3'-phosphate
  modified_base 20: mod_base = OTHER; note = 2'-fluorocytidine-3'-phosphate
  modified_base 21: mod_base = OTHER; note = 2'-O-methylcytidine-3'-phosphorothioate
  modified_base 22: mod_base = OTHER; note = 2'-O-methyluridine-3'-phosphorothioate
  modified_base 23: mod_base = OTHER; note = 2'-O-methylcytidine-3'-phosphate
  modified_base 24: mod_base = OTHER; note = 2'-O-methylcytidine-3'-phosphate
  modified_base 25: mod_base = OTHER; note = 2'-O-methylguanosine-3'-phosphate
  modified_base 26: mod_base = OTHER; note = 2'-O-methylcytidine-3'-phosphate
taccaatttatgcctacagcctccgc

SEQ ID NO: 67 - RNA, 26 nt, synthetic construct
  source 1..26: mol_type = other RNA
  modified_base 1: mod_base = OTHER; note = vinyl phosphonate-2'-O-methyluridine-3'-phosphorothioate
  modified_base 2: mod_base = OTHER; note = 2'-fluoroadenosine-3'-phosporothioate
  modified_base 3: mod_base = OTHER; note = 2'-O-methylcytidine-3'-phosphate
  modified_base 4: mod_base = OTHER; note = 2'-fluorocytidine-3'-phosphate
  modified_base 5: mod_base = OTHER; note = 2'-O-methyladenosine-3'-phosphate
  modified_base 6: mod_base = OTHER; note = 2'-fluoroadenosine-3'-phosphate
  modified_base 7: mod_base = OTHER; note = 2'-O-methyluridine-3'-phosphate
  modified_base 8: mod_base = OTHER; note = 2'-fluorouridine-3'-phosphate
  modified_base 9: mod_base = OTHER; note = 2'-O-methyluridine-3'-phosphate
  modified_base 10: mod_base = OTHER; note = 2'-fluoroadenosine-3'-phosphate
  modified_base 11: mod_base = OTHER; note = 2'-O-methyluridine-3'-phosphate
  modified_base 12: mod_base = OTHER; note = 2'-fluoroguanosine-3'-phosphate
  modified_base 13: mod_base = OTHER; note = 2'-O-methylcytidine-3'-phosphate
  modified_base 14: mod_base = OTHER; note = 2'-fluorocytidine-3'-phosphate
  modified_base 15: mod_base = OTHER; note = 2'-O-methyluridine-3'-phosphate
  modified_base 16: mod_base = OTHER; note = 2'-fluoroadenosine-3'-phosphate
  modified_base 17: mod_base = OTHER; note = 2'-O-methylcytidine-3'-phosphate
  modified_base 18: mod_base = OTHER; note = 2'-fluoroadenosine-3'-phosphate
  modified_base 19: mod_base = OTHER; note = 2'-O-methylguanosine-3'-phosphate
  modified_base 20: mod_base = OTHER; note = 2'-fluorocytidine-3'-phosphate
  modified_base 21: mod_base = OTHER; note = 2'-O-methylcytidine-3'-phosphorothioate
  modified_base 22: mod_base = OTHER; note = 2'-O-methyluridine-3'-phosphorothioate
  modified_base 23: mod_base = OTHER; note = 2'-O-methylcytidine-3'-phosphate
  modified_base 24: mod_base = OTHER; note = 2'-O-methylcytidine-3'-phosphate
  modified_base 25: mod_base = OTHER; note = 2'-O-methylguanosine-3'-phosphate
  modified_base 26: mod_base = OTHER; note = 2'-O-methylcytidine-3'-phosphate
taccaatttatgcctacagcctccgc

SEQ ID NO: 68 - RNA, 21 nt, synthetic construct
  source 1..21: mol_type = other RNA
  modified_base 1: mod_base = OTHER; note = 2'-O-methyluridine-3'-phosphorothioate
  modified_base 2: mod_base = OTHER; note = 2'-fluoroadenosine-3'-phosporothioate
  modified_base 3: mod_base = OTHER; note = 2'-O-methylcytidine-3'-phosphorothioate
  modified_base 4: mod_base = OTHER; note = 2'-fluorocytidine-3'-phosphate
  modified_base 5: mod_base = OTHER; note = 2'-O-methyladenosine-3'-phosphate
  modified_base 6: mod_base = OTHER; note = 2'-fluoroadenosine-3'-phosphate
  modified_base 7: mod_base = OTHER; note = 2'-O-methyluridine-3'-phosphate
  modified_base 8: mod_base = OTHER; note = 2'-fluorouridine-3'-phosphate
  modified_base 9: mod_base = OTHER; note = 2'-O-methyluridine-3'-phosphate
  modified_base 10: mod_base = OTHER; note = 2'-fluoroadenosine-3'-phosphate
  modified_base 11: mod_base = OTHER; note = 2'-O-methyluridine-3'-phosphate
  modified_base 12: mod_base = OTHER; note = 2'-fluoroguanosine-3'-phosphate
  modified_base 13: mod_base = OTHER; note = 2'-O-methylcytidine-3'-phosphate
  modified_base 14: mod_base = OTHER; note = 2'-fluorocytidine-3'-phosphate
  modified_base 15: mod_base = OTHER; note = 2'-O-methyluridine-3'-phosphate
  modified_base 16: mod_base = OTHER; note = 2'-fluoroadenosine-3'-phosphate
  modified_base 17: mod_base = OTHER; note = 2'-O-methylcytidine-3'-phosphate
  modified_base 18: mod_base = OTHER; note = 2'-fluoroadenosine-3'-phosphate
  modified_base 19: mod_base = OTHER; note = 2'-O-methylguanosine-3'-phosphate
  modified_base 20: mod_base = OTHER; note = 2'-O-methyluridine-3'-phosphorothioate
  modified_base 21: mod_base = OTHER; note = 2'-O-methyluridine-3'-phosphate
taccaatttatgcctacagtt

SEQ ID NO: 69 - RNA, 21 nt, synthetic construct
  source 1..21: mol_type = other RNA
  modified_base 1: mod_base = OTHER; note = 2'-O-methyluridine-3'-phosphorothioate
  modified_base 2: mod_base = OTHER; note = 2'-fluoroadenosine-3'-phosporothioate
  modified_base 3: mod_base = OTHER; note = 2'-O-methylcytidine-3'-phosphorothioate
  modified_base 4: mod_base = OTHER; note = 2'-fluorocytidine-3'-phosphate
  modified_base 5: mod_base = OTHER; note = 2'-O-methyladenosine-3'-phosphate
  modified_base 6: mod_base = OTHER; note = 2'-fluoroadenosine-3'-phosphate
  modified_base 7: mod_base = OTHER; note = 2'-O-methyluridine-3'-phosphate
  modified_base 8: mod_base = OTHER; note = 2'-fluorouridine-3'-phosphate
  modified_base 9: mod_base = OTHER; note = 2'-O-methyluridine-3'-phosphate
  modified_base 10: mod_base = OTHER; note = 2'-fluoroadenosine-3'-phosphate
  modified_base 11: mod_base = OTHER; note = 2'-O-methyluridine-3'-phosphate
  modified_base 12: mod_base = OTHER; note = 2'-fluoroguanosine-3'-phosphate
  modified_base 13: mod_base = OTHER; note = 2'-O-methylcytidine-3'-phosphate
  modified_base 14: mod_base = OTHER; note = 2'-fluorocytidine-3'-phosphate
  modified_base 15: mod_base = OTHER; note = 2'-O-methyluridine-3'-phosphate
  modified_base 16: mod_base = OTHER; note = 2'-fluoroadenosine-3'-phosphate
  modified_base 17: mod_base = OTHER; note = 2'-O-methylcytidine-3'-phosphate
  modified_base 18: mod_base = OTHER; note = 2'-fluoroadenosine-3'-phosphate
  modified_base 19: mod_base = OTHER; note = 2'-O-methylguanosine-3'-phosphate
  modified_base 20: mod_base = OTHER; note = 2'-O-methylguanosine-3'-phosphorothioate
  modified_base 21: mod_base = OTHER; note = 2'-O-methylcytidine-3'-phosphate
taccaatttatgcctacaggc

SEQ ID NO: 70 - RNA, 21 nt, synthetic construct
  source 1..21: mol_type = other RNA
  modified_base 1: mod_base = OTHER; note = vinyl phosphonate-2'-O-methyluridine-3'-phosphorothioate
  modified_base 2: mod_base = OTHER; note = 2'-fluoroadenosine-3'-phosporothioate
  modified_base 3: mod_base = OTHER; note = 2'-O-methylcytidine-3'-phosphorothioate
  modified_base 4: mod_base = OTHER; note = 2'-fluorocytidine-3'-phosphate
  modified_base 5: mod_base = OTHER; note = 2'-O-methyladenosine-3'-phosphate
  modified_base 6: mod_base = OTHER; note = 2'-fluoroadenosine-3'-phosphate
  modified_base 7: mod_base = OTHER; note = 2'-O-methyluridine-3'-phosphate
  modified_base 8: mod_base = OTHER; note = 2'-fluorouridine-3'-phosphate
  modified_base 9: mod_base = OTHER; note = 2'-O-methyluridine-3'-phosphate
  modified_base 10: mod_base = OTHER; note = 2'-fluoroadenosine-3'-phosphate
  modified_base 11: mod_base = OTHER; note = 2'-O-methyluridine-3'-phosphate
  modified_base 12: mod_base = OTHER; note = 2'-fluoroguanosine-3'-phosphate
  modified_base 13: mod_base = OTHER; note = 2'-O-methylcytidine-3'-phosphate
  modified_base 14: mod_base = OTHER; note = 2'-fluorocytidine-3'-phosphate
  modified_base 15: mod_base = OTHER; note = 2'-O-methyluridine-3'-phosphate
  modified_base 16: mod_base = OTHER; note = 2'-fluoroadenosine-3'-phosphate
  modified_base 17: mod_base = OTHER; note = 2'-O-methylcytidine-3'-phosphate
  modified_base 18: mod_base = OTHER; note = 2'-fluoroadenosine-3'-phosphate
  modified_base 19: mod_base = OTHER; note = 2'-O-methylguanosine-3'-phosphate
  modified_base 20: mod_base = OTHER; note = 2'-fluoroguanosine-3'-phosphorothioate
  modified_base 21: mod_base = OTHER; note = 2'-O-methylcytidine-3'-phosphate
taccaatttatgcctacaggc

SEQ ID NO: 71 - RNA, 21 nt, synthetic construct
  source 1..21: mol_type = other RNA
  modified_base 1: mod_base = OTHER; note = vinyl phosphonate-2'-O-methyluridine-3'-phosphorothioate
  modified_base 2: mod_base = OTHER; note = 2'-fluoroadenosine-3'-phosporothioate
  modified_base 3: mod_base = OTHER; note = 2'-O-methylcytidine-3'-phosphorothioate
  modified_base 4: mod_base = OTHER; note = 2'-fluorocytidine-3'-phosphate
  modified_base 5: mod_base = OTHER; note = 2'-O-methyladenosine-3'-phosphate
  modified_base 6: mod_base = OTHER; note = 2'-fluoroadenosine-3'-phosphate
  modified_base 7: mod_base = OTHER; note = 2'-O-methyluridine-3'-phosphate
  modified_base 8: mod_base = OTHER; note = 2'-fluorouridine-3'-phosphate
  modified_base 9: mod_base = OTHER; note = 2'-O-methyluridine-3'-phosphate
  modified_base 10: mod_base = OTHER; note = 2'-fluoroadenosine-3'-phosphate
  modified_base 11: mod_base = OTHER; note = 2'-O-methyluridine-3'-phosphate
  modified_base 12: mod_base = OTHER; note = 2'-fluoroguanosine-3'-phosphate
  modified_base 13: mod_base = OTHER; note = 2'-O-methylcytidine-3'-phosphate
  modified_base 14: mod_base = OTHER; note = 2'-fluorocytidine-3'-phosphate
  modified_base 15: mod_base = OTHER; note = 2'-O-methyluridine-3'-phosphate
  modified_base 16: mod_base = OTHER; note = 2'-fluoroadenosine-3'-phosphate
  modified_base 17: mod_base = OTHER; note = 2'-O-methylcytidine-3'-phosphate
  modified_base 18: mod_base = OTHER; note = 2'-fluoroadenosine-3'-phosphate
  modified_base 19: mod_base = OTHER; note = 2'-O-methylguanosine-3'-phosphate
  modified_base 20: mod_base = OTHER; note = 2'-O-methyluridine-3'-phosphorothioate
  modified_base 21: mod_base = OTHER; note = 2'-O-methyluridine-3'-phosphate
taccaatttatgcctacagtt

SEQ ID NO: 72 - RNA, 21 nt, synthetic construct
  source 1..21: mol_type = other RNA
  modified_base 1: mod_base = OTHER; note = 2'-O-methyladenosine-3'-phosphorothioate
  modified_base 2: mod_base = OTHER; note = 2'-fluorouridine-3'-phosphorothioate
  modified_base 3: mod_base = OTHER; note = 2'-O-methyluridine-3'-phosphorothioate
  modified_base 4: mod_base = OTHER; note = 2'-fluoroguanosine-3'-phosphate
  modified_base 5: mod_base = OTHER; note = 2'-O-methyladenosine-3'-phosphate
  modified_base 6: mod_base = OTHER; note = 2'-fluoroguanosine-3'-phosphate
  modified_base 7: mod_base = OTHER; note = 2'-O-methyladenosine-3'-phosphate
  modified_base 8: mod_base = OTHER; note = 2'-fluoroguanosine-3'-phosphate
  modified_base 9: mod_base = OTHER; note = 2'-O-methyladenosine-3'-phosphate
  modified_base 10: mod_base = OTHER; note = 2'-fluoroadenosine-3'-phosphate
  modified_base 11: mod_base = OTHER; note = 2'-O-methylguanosine-3'-phosphate
  modified_base 12: mod_base = OTHER; note = 2'-fluorouridine-3'-phosphate
  modified_base 13: mod_base = OTHER; note = 2'-O-methylcytidine-3'-phosphate
  modified_base 14: mod_base = OTHER; note = 2'-fluorocytidine-3'-phosphate
  modified_base 15: mod_base = OTHER; note = 2'-O-methyladenosine-3'-phosphate
  modified_base 16: mod_base = OTHER; note = 2'-fluorocytidine-3'-phosphate
  modified_base 17: mod_base = OTHER; note = 2'-O-methylcytidine-3'-phosphate
  modified_base 18: mod_base = OTHER; note = 2'-fluoroadenosine-3'-phosphate
  modified_base 19: mod_base = OTHER; note = 2'-O-methylcytidine-3'-phosphate
  modified_base 20: mod_base = OTHER; note = 2'-fluoroguanosine-3'-phosphorothioate
  modified_base 21: mod_base = OTHER; note = 2'-O-methyladenosine-3'-phosphate
attgagagaagtccaccacga

SEQ ID NO: 73 - RNA, 21 nt, synthetic construct
  source 1..21: mol_type = other RNA
  modified_base 1: mod_base = OTHER; note = 2'-O-methyladenosine-3'-phosphorothioate
  modified_base 2: mod_base = OTHER; note = 2'-fluorouridine-3'-phosphorothioate
  modified_base 3: mod_base = OTHER; note = 2'-O-methyluridine-3'-phosphorothioate
  modified_base 4: mod_base = OTHER; note = 2'-fluoroguanosine-3'-phosphate
  modified_base 5: mod_base = OTHER; note = 2'-O-methyladenosine-3'-phosphate
  modified_base 6: mod_base = OTHER; note = 2'-fluoroguanosine-3'-phosphate
  modified_base 7: mod_base = OTHER; note = 2'-O-methyladenosine-3'-phosphate
  modified_base 8: mod_base = OTHER; note = 2'-fluoroguanosine-3'-phosphate
  modified_base 9: mod_base = OTHER; note = 2'-O-methyladenosine-3'-phosphate
  modified_base 10: mod_base = OTHER; note = 2'-fluoroadenosine-3'-phosphate
  modified_base 11: mod_base = OTHER; note = 2'-O-methylguanosine-3'-phosphate
  modified_base 12: mod_base = OTHER; note = 2'-fluorouridine-3'-phosphate
  modified_base 13: mod_base = OTHER; note = 2'-O-methylcytidine-3'-phosphate
  modified_base 14: mod_base = OTHER; note = 2'-fluorocytidine-3'-phosphate
  modified_base 15: mod_base = OTHER; note = 2'-O-methyladenosine-3'-phosphate
  modified_base 16: mod_base = OTHER; note = 2'-fluorocytidine-3'-phosphate
  modified_base 17: mod_base = OTHER; note = 2'-O-methylcytidine-3'-phosphate
  modified_base 18: mod_base = OTHER; note = 2'-fluoroadenosine-3'-phosphate
  modified_base 19: mod_base = OTHER; note = 2'-O-methylcytidine-3'-phosphate
  modified_base 20: mod_base = OTHER; note = 2'-O-methylguanosine-3'-phosphorothioate
  modified_base 21: mod_base = OTHER; note = 2'-O-methyladenosine-3'-phosphate
attgagagaagtccaccacga

SEQ ID NO: 74 - RNA, 21 nt, synthetic construct
  source 1..21: mol_type = other RNA
  modified_base 1: mod_base = OTHER; note = 2'-O-methyladenosine-3'-phosphorothioate
  modified_base 2: mod_base = OTHER; note = 2'-fluorouridine-3'-phosphorothioate
  modified_base 3: mod_base = OTHER; note = 2'-O-methyluridine-3'-phosphorothioate
  modified_base 4: mod_base = OTHER; note = 2'-fluoroguanosine-3'-phosphate
  modified_base 5: mod_base = OTHER; note = 2'-O-methyladenosine-3'-phosphate
  modified_base 6: mod_base = OTHER; note = 2'-fluoroguanosine-3'-phosphate
  modified_base 7: mod_base = OTHER; note = 2'-O-methyladenosine-3'-phosphate
  modified_base 8: mod_base = OTHER; note = 2'-fluoroguanosine-3'-phosphate
  modified_base 9: mod_base = OTHER; note = 2'-O-methyladenosine-3'-phosphate
  modified_base 10: mod_base = OTHER; note = 2'-fluoroadenosine-3'-phosphate
  modified_base 11: mod_base = OTHER; note = 2'-O-methylguanosine-3'-phosphate
  modified_base 12: mod_base = OTHER; note = 2'-fluorouridine-3'-phosphate
  modified_base 13: mod_base = OTHER; note = 2'-O-methylcytidine-3'-phosphate
  modified_base 14: mod_base = OTHER; note = 2'-fluorocytidine-3'-phosphate
  modified_base 15: mod_base = OTHER; note = 2'-O-methyladenosine-3'-phosphate
  modified_base 16: mod_base = OTHER; note = 2'-fluorocytidine-3'-phosphate
  modified_base 17: mod_base = OTHER; note = 2'-O-methylcytidine-3'-phosphate
  modified_base 18: mod_base = OTHER; note = 2'-fluoroadenosine-3'-phosphate
  modified_base 19: mod_base = OTHER; note = 2'-O-methylcytidine-3'-phosphate
  modified_base 20: mod_base = OTHER; note = 2'-O-methyluridine-3'-phosphorothioate
  modified_base 21: mod_base = OTHER; note = 2'-O-methyluridine-3'-phosphate
attgagagaagtccaccactt

SEQ ID NO: 75 - RNA, 21 nt, synthetic construct
  source 1..21: mol_type = other RNA
  modified_base 1: mod_base = OTHER; note = vinyl phosphonate-2'-O-methyluridine-3'-phosphorothioate
  modified_base 2: mod_base = OTHER; note = 2'-fluorouridine-3'-phosphorothioate
  modified_base 3: mod_base = OTHER; note = 2'-O-methyluridine-3'-phosphorothioate
  modified_base 4: mod_base = OTHER; note = 2'-fluoroguanosine-3'-phosphate
  modified_base 5: mod_base = OTHER; note = 2'-O-methyladenosine-3'-phosphate
  modified_base 6: mod_base = OTHER; note = 2'-fluoroguanosine-3'-phosphate
  modified_base 7: mod_base = OTHER; note = 2'-O-methyladenosine-3'-phosphate
  modified_base 8: mod_base = OTHER; note = 2'-fluoroguanosine-3'-phosphate
  modified_base 9: mod_base = OTHER; note = 2'-O-methyladenosine-3'-phosphate
  modified_base 10: mod_base = OTHER; note = 2'-fluoroadenosine-3'-phosphate
  modified_base 11: mod_base = OTHER; note = 2'-O-methylguanosine-3'-phosphate
  modified_base 12: mod_base = OTHER; note = 2'-fluorouridine-3'-phosphate
  modified_base 13: mod_base = OTHER; note = 2'-O-methylcytidine-3'-phosphate
  modified_base 14: mod_base = OTHER; note = 2'-fluorocytidine-3'-phosphate
  modified_base 15: mod_base = OTHER; note = 2'-O-methyladenosine-3'-phosphate
  modified_base 16: mod_base = OTHER; note = 2'-fluorocytidine-3'-phosphate
  modified_base 17: mod_base = OTHER; note = 2'-O-methylcytidine-3'-phosphate
  modified_base 18: mod_base = OTHER; note = 2'-fluoroadenosine-3'-phosphate
  modified_base 19: mod_base = OTHER; note = 2'-O-methylcytidine-3'-phosphate
  modified_base 20: mod_base = OTHER; note = 2'-fluoroguanosine-3'-phosphorothioate
  modified_base 21: mod_base = OTHER; note = 2'-O-methyladenosine-3'-phosphate
tttgagagaagtccaccacga

SEQ ID NO: 76 - RNA, 21 nt, synthetic construct
  source 1..21: mol_type = other RNA
  modified_base 1: mod_base = OTHER; note = 2'-O-methyladenosine-3'-phosphorothioate
  modified_base 2: mod_base = OTHER; note = 2'-fluoroadenosine-3'-phosporothioate
  modified_base 3: mod_base = OTHER; note = 2'-O-methyluridine-3'-phosphorothioate
  modified_base 4: mod_base = OTHER; note = 2'-fluorouridine-3'-phosphate
  modified_base 5: mod_base = OTHER; note = 2'-O-methylguanosine-3'-phosphate
  modified_base 6: mod_base = OTHER; note = 2'-fluoroadenosine-3'-phosphate
  modified_base 7: mod_base = OTHER; note = 2'-O-methylguanosine-3'-phosphate
  modified_base 8: mod_base = OTHER; note = 2'-fluoroadenosine-3'-phosphate
  modified_base 9: mod_base = OTHER; note = 2'-O-methylguanosine-3'-phosphate
  modified_base 10: mod_base = OTHER; note = 2'-fluoroadenosine-3'-phosphate
  modified_base 11: mod_base = OTHER; note = 2'-O-methyladenosine-3'-phosphate
  modified_base 12: mod_base = OTHER; note = 2'-fluoroguanosine-3'-phosphate
  modified_base 13: mod_base = OTHER; note = 2'-O-methyluridine-3'-phosphate
  modified_base 14: mod_base = OTHER; note = 2'-fluorocytidine-3'-phosphate
  modified_base 15: mod_base = OTHER; note = 2'-O-methylcytidine-3'-phosphate
  modified_base 16: mod_base = OTHER; note = 2'-fluoroadenosine-3'-phosphate
  modified_base 17: mod_base = OTHER; note = 2'-O-methylcytidine-3'-phosphate
  modified_base 18: mod_base = OTHER; note = 2'-fluorocytidine-3'-phosphate
  modified_base 19: mod_base = OTHER; note = 2'-O-methyladenosine-3'-phosphate
  modified_base 20: mod_base = OTHER; note = 2'-fluorocytidine-3'-phosphorothioate
  modified_base 21: mod_base = OTHER; note = 2'-O-methylguanosine-3'-phosphate
aattgagagaagtccaccacg

SEQ ID NO: 77 - RNA, 21 nt, synthetic construct
  source 1..21: mol_type = other RNA
  modified_base 1: mod_base = OTHER; note = 2'-O-methyladenosine-3'-phosphorothioate
  modified_base 2: mod_base = OTHER; note = 2'-fluoroadenosine-3'-phosporothioate
  modified_base 3: mod_base = OTHER; note = 2'-O-methyluridine-3'-phosphorothioate
  modified_base 4: mod_base = OTHER; note = 2'-fluorouridine-3'-phosphate
  modified_base 5: mod_base = OTHER; note = 2'-O-methylguanosine-3'-phosphate
  modified_base 6: mod_base = OTHER; note = 2'-fluoroadenosine-3'-phosphate
  modified_base 7: mod_base = OTHER; note = 2'-O-methylguanosine-3'-phosphate
  modified_base 8: mod_base = OTHER; note = 2'-fluoroadenosine-3'-phosphate
  modified_base 9: mod_base = OTHER; note = 2'-O-methylguanosine-3'-phosphate
  modified_base 10: mod_base = OTHER; note = 2'-fluoroadenosine-3'-phosphate
  modified_base 11: mod_base = OTHER; note = 2'-O-methyladenosine-3'-phosphate
  modified_base 12: mod_base = OTHER; note = 2'-fluoroguanosine-3'-phosphate
  modified_base 13: mod_base = OTHER; note = 2'-O-methyluridine-3'-phosphate
  modified_base 14: mod_base = OTHER; note = 2'-fluorocytidine-3'-phosphate
  modified_base 15: mod_base = OTHER; note = 2'-O-methylcytidine-3'-phosphate
  modified_base 16: mod_base = OTHER; note = 2'-fluoroadenosine-3'-phosphate
  modified_base 17: mod_base = OTHER; note = 2'-O-methylcytidine-3'-phosphate
  modified_base 18: mod_base = OTHER; note = 2'-fluorocytidine-3'-phosphate
  modified_base 19: mod_base = OTHER; note = 2'-O-methyladenosine-3'-phosphate
  modified_base 20: mod_base = OTHER; note = 2'-O-methylcytidine-3'-phosphorothioate
  modified_base 21: mod_base = OTHER; note = 2'-O-methylguanosine-3'-phosphate
aattgagagaagtccaccacg

SEQ ID NO: 78 - RNA, 21 nt, synthetic construct
  source 1..21: mol_type = other RNA
  modified_base 1: mod_base = OTHER; note = 2'-O-methyladenosine-3'-phosphorothioate
  modified_base 2: mod_base = OTHER; note = 2'-fluoroadenosine-3'-phosporothioate
  modified_base 3: mod_base = OTHER; note = 2'-O-methyluridine-3'-phosphorothioate
  modified_base 4: mod_base = OTHER; note = 2'-fluorouridine-3'-phosphate
  modified_base 5: mod_base = OTHER; note = 2'-O-methylguanosine-3'-phosphate
  modified_base 6: mod_base = OTHER; note = 2'-fluoroadenosine-3'-phosphate
  modified_base 7: mod_base = OTHER; note = 2'-O-methylguanosine-3'-phosphate
  modified_base 8: mod_base = OTHER; note = 2'-fluoroadenosine-3'-phosphate
  modified_base 9: mod_base = OTHER; note = 2'-O-methylguanosine-3'-phosphate
  modified_base 10: mod_base = OTHER; note = 2'-fluoroadenosine-3'-phosphate
  modified_base 11: mod_base = OTHER; note = 2'-O-methyladenosine-3'-phosphate
  modified_base 12: mod_base = OTHER; note = 2'-fluoroguanosine-3'-phosphate
  modified_base 13: mod_base = OTHER; note = 2'-O-methyluridine-3'-phosphate
  modified_base 14: mod_base = OTHER; note = 2'-fluorocytidine-3'-phosphate
  modified_base 15: mod_base = OTHER; note = 2'-O-methylcytidine-3'-phosphate
  modified_base 16: mod_base = OTHER; note = 2'-fluoroadenosine-3'-phosphate
  modified_base 17: mod_base = OTHER; note = 2'-O-methylcytidine-3'-phosphate
  modified_base 18: mod_base = OTHER; note = 2'-fluorocytidine-3'-phosphate
  modified_base 19: mod_base = OTHER; note = 2'-O-methyladenosine-3'-phosphate
  modified_base 20: mod_base = OTHER; note = 2'-O-methyluridine-3'-phosphorothioate
  modified_base 21: mod_base = OTHER; note = 2'-O-methyluridine-3'-phosphate
aattgagagaagtccaccatt

SEQ ID NO: 79 - RNA, 21 nt, synthetic construct
  source 1..21: mol_type = other RNA
  modified_base 1: mod_base = OTHER; note = vinyl phosphonate-2'-O-methyluridine-3'-phosphorothioate
  modified_base 2: mod_base = OTHER; note = 2'-fluoroadenosine-3'-phosporothioate
  modified_base 3: mod_base = OTHER; note = 2'-O-methyluridine-3'-phosphorothioate
  modified_base 4: mod_base = OTHER; note = 2'-fluorouridine-3'-phosphate
  modified_base 5: mod_base = OTHER; note = 2'-O-methylguanosine-3'-phosphate
  modified_base 6: mod_base = OTHER; note = 2'-fluoroadenosine-3'-phosphate
  modified_base 7: mod_base = OTHER; note = 2'-O-methylguanosine-3'-phosphate
  modified_base 8: mod_base = OTHER; note = 2'-fluoroadenosine-3'-phosphate
  modified_base 9: mod_base = OTHER; note = 2'-O-methylguanosine-3'-phosphate
  modified_base 10: mod_base = OTHER; note = 2'-fluoroadenosine-3'-phosphate
  modified_base 11: mod_base = OTHER; note = 2'-O-methyladenosine-3'-phosphate
  modified_base 12: mod_base = OTHER; note = 2'-fluoroguanosine-3'-phosphate
  modified_base 13: mod_base = OTHER; note = 2'-O-methyluridine-3'-phosphate
  modified_base 14: mod_base = OTHER; note = 2'-fluorocytidine-3'-phosphate
  modified_base 15: mod_base = OTHER; note = 2'-O-methylcytidine-3'-phosphate
  modified_base 16: mod_base = OTHER; note = 2'-fluoroadenosine-3'-phosphate
  modified_base 17: mod_base = OTHER; note = 2'-O-methylcytidine-3'-phosphate
  modified_base 18: mod_base = OTHER; note = 2'-fluorocytidine-3'-phosphate
  modified_base 19: mod_base = OTHER; note = 2'-O-methyladenosine-3'-phosphate
  modified_base 20: mod_base = OTHER; note = 2'-fluorocytidine-3'-phosphorothioate
  modified_base 21: mod_base = OTHER; note = 2'-O-methylguanosine-3'-phosphate
tattgagagaagtccaccacg

SEQ ID NO: 80 - RNA, 21 nt, synthetic construct
  source 1..21: mol_type = other RNA
  modified_base 1: mod_base = OTHER; note = 2'-O-methyluridine-3'-phosphorothioate
  modified_base 2: mod_base = OTHER; note = 2'-fluoroadenosine-3'-phosporothioate
  modified_base 3: mod_base = OTHER; note = 2'-O-methylcytidine-3'-phosphorothioate
  modified_base 4: mod_base = OTHER; note = 2'-fluorocytidine-3'-phosphate
  modified_base 5: mod_base = OTHER; note = 2'-O-methyladenosine-3'-phosphate
  modified_base 6: mod_base = OTHER; note = 2'-fluoroadenosine-3'-phosphate
  modified_base 7: mod_base = OTHER; note = 2'-O-methyluridine-3'-phosphate
  modified_base 8: mod_base = OTHER; note = 2'-fluorouridine-3'-phosphate
  modified_base 9: mod_base = OTHER; note = 2'-O-methyluridine-3'-phosphate
  modified_base 10: mod_base = OTHER; note = 2'-fluoroadenosine-3'-phosphate
  modified_base 11: mod_base = OTHER; note = 2'-O-methyluridine-3'-phosphate
  modified_base 12: mod_base = OTHER; note = 2'-fluoroguanosine-3'-phosphate
  modified_base 13: mod_base = OTHER; note = 2'-O-methylcytidine-3'-phosphate
  modified_base 14: mod_base = OTHER; note = 2'-fluorocytidine-3'-phosphate
  modified_base 15: mod_base = OTHER; note = 2'-O-methyluridine-3'-phosphate
  modified_base 16: mod_base = OTHER; note = 2'-fluoroadenosine-3'-phosphate
  modified_base 17: mod_base = OTHER; note = 2'-O-methylcytidine-3'-phosphate
  modified_base 18: mod_base = OTHER; note = 2'-fluoroadenosine-3'-phosphate
  modified_base 19: mod_base = OTHER; note = 2'-O-methylguanosine-3'-phosphate
  modified_base 20: mod_base = OTHER; note = 2'-fluoroguanosine-3'-phosphorothioate
  modified_base 21: mod_base = OTHER; note = 2'-O-methyluridine-3'-phosphate
taccaatttatgcctacaggt

SEQ ID NO: 81 - RNA, 21 nt, synthetic construct
  source 1..21: mol_type = other RNA
  modified_base 1: mod_base = OTHER; note = 2'-O-methyluridine-3'-phosphorothioate
  modified_base 2: mod_base = OTHER; note = 2'-fluoroadenosine-3'-phosporothioate
  modified_base 3: mod_base = OTHER; note = 2'-O-methylcytidine-3'-phosphate
  modified_base 4: mod_base = OTHER; note = 2'-fluorocytidine-3'-phosphate
  modified_base 5: mod_base = OTHER; note = 2'-O-methyladenosine-3'-phosphate
  modified_base 6: mod_base = OTHER; note = 2'-fluoroadenosine-3'-phosphate
  modified_base 7: mod_base = OTHER; note = 2'-O-methyluridine-3'-phosphate
  modified_base 8: mod_base = OTHER; note = 2'-fluorouridine-3'-phosphate
  modified_base 9: mod_base = OTHER; note = 2'-O-methyluridine-3'-phosphate
  modified_base 10: mod_base = OTHER; note = 2'-fluoroadenosine-3'-phosphate
  modified_base 11: mod_base = OTHER; note = 2'-O-methyluridine-3'-phosphate
  modified_base 12: mod_base = OTHER; note = 2'-fluoroguanosine-3'-phosphate
  modified_base 13: mod_base = OTHER; note = 2'-O-methylcytidine-3'-phosphate
  modified_base 14: mod_base = OTHER; note = 2'-fluorocytidine-3'-phosphate
  modified_base 15: mod_base = OTHER; note = 2'-O-methyluridine-3'-phosphate
  modified_base 16: mod_base = OTHER; note = 2'-fluoroadenosine-3'-phosphate
  modified_base 17: mod_base = OTHER; note = 2'-O-methylcytidine-3'-phosphate
  modified_base 18: mod_base = OTHER; note = 2'-fluoroadenosine-3'-phosphate
  modified_base 19: mod_base = OTHER; note = 2'-O-methylguanosine-3'-phosphorothioate
  modified_base 20: mod_base = OTHER; note = 2'-O-methyluridine-3'-phosphorothioate
  modified_base 21: mod_base = OTHER; note = 2'-O-methyluridine-3'-phosphate
taccaatttatgcctacagtt

SEQ ID NO: 82 - RNA, 21 nt, synthetic construct
  source 1..21: mol_type = other RNA
  modified_base 1: mod_base = OTHER; note = 2'-O-methyluridine-3'-phosphorothioate
  modified_base 2: mod_base = OTHER; note = 2'-fluoroadenosine-3'-phosporothioate
  modified_base 3: mod_base = OTHER; note = 2'-O-methylcytidine-3'-phosphorothioate
  modified_base 4: mod_base = OTHER; note = 2'-fluorocytidine-3'-phosphate
  modified_base 5: mod_base = OTHER; note = 2'-O-methyladenosine-3'-phosphate
  modified_base 6: mod_base = OTHER; note = 2'-fluoroadenosine-3'-phosphate
  modified_base 7: mod_base = OTHER; note = 2'-O-methyluridine-3'-phosphate
  modified_base 8: mod_base = OTHER; note = 2'-fluorouridine-3'-phosphate
  modified_base 9: mod_base = OTHER; note = 2'-O-methyluridine-3'-phosphate
  modified_base 10: mod_base = OTHER; note = 2'-fluoroadenosine-3'-phosphate
  modified_base 11: mod_base = OTHER; note = 2'-O-methyluridine-3'-phosphate
  modified_base 12: mod_base = OTHER; note = 2'-fluoroguanosine-3'-phosphate
  modified_base 13: mod_base = OTHER; note = 2'-O-methylcytidine-3'-phosphate
  modified_base 14: mod_base = OTHER; note = 2'-fluorocytidine-3'-phosphate
  modified_base 15: mod_base = OTHER; note = 2'-O-methyluridine-3'-phosphate
  modified_base 16: mod_base = OTHER; note = 2'-fluoroadenosine-3'-phosphate
  modified_base 17: mod_base = OTHER; note = 2'-O-methylcytidine-3'-phosphate
  modified_base 18: mod_base = OTHER; note = 2'-fluoroadenosine-3'-phosphate
  modified_base 19: mod_base = OTHER; note = 2'-O-methylguanosine-3'-phosphate
  modified_base 20: mod_base = OTHER; note = 2'-O-methylcytidine-3'-phosphorothioate
  modified_base 21: mod_base = OTHER; note = 2'-O-methylcytidine-3'-phosphate
taccaatttatgcctacagcc

SEQ ID NO: 83 - RNA, 23 nt, synthetic construct
  source 1..23: mol_type = other RNA
  modified_base 1: mod_base = OTHER; note = 2'-O-methyluridine-3'-phosphorothioate
  modified_base 2: mod_base = OTHER; note = 2'-fluoroadenosine-3'-phosporothioate
  modified_base 3: mod_base = OTHER; note = 2'-O-methylcytidine-3'-phosphorothioate
  modified_base 4: mod_base = OTHER; note = 2'-fluorocytidine-3'-phosphate
  modified_base 5: mod_base = OTHER; note = 2'-O-methyladenosine-3'-phosphate
  modified_base 6: mod_base = OTHER; note = 2'-fluoroadenosine-3'-phosphate
  modified_base 7: mod_base = OTHER; note = 2'-O-methyluridine-3'-phosphate
  modified_base 8: mod_base = OTHER; note = 2'-fluorouridine-3'-phosphate
  modified_base 9: mod_base = OTHER; note = 2'-O-methyluridine-3'-phosphate
  modified_base 10: mod_base = OTHER; note = 2'-fluoroadenosine-3'-phosphate
  modified_base 11: mod_base = OTHER; note = 2'-O-methyluridine-3'-phosphate
  modified_base 12: mod_base = OTHER; note = 2'-fluoroguanosine-3'-phosphate
  modified_base 13: mod_base = OTHER; note = 2'-O-methylcytidine-3'-phosphate
  modified_base 14: mod_base = OTHER; note = 2'-fluorocytidine-3'-phosphate
  modified_base 15: mod_base = OTHER; note = 2'-O-methyluridine-3'-phosphate
  modified_base 16: mod_base = OTHER; note = 2'-fluoroadenosine-3'-phosphate
  modified_base 17: mod_base = OTHER; note = 2'-O-methylcytidine-3'-phosphate
  modified_base 18: mod_base = OTHER; note = 2'-fluoroadenosine-3'-phosphate
  modified_base 19: mod_base = OTHER; note = 2'-O-methylguanosine-3'-phosphate
  modified_base 20: mod_base = OTHER; note = 2'-O-methylcytidine-3'-phosphate
  modified_base 21: mod_base = OTHER; note = 2'-O-methylcytidine-3'-phosphate
  modified_base 22: mod_base = OTHER; note = 2'-O-methyluridine-3'-phosphorothioate
  modified_base 23: mod_base = OTHER; note = 2'-O-methyluridine-3'-phosphate
taccaatttatgcctacagcctt

SEQ ID NO: 84 - RNA, 23 nt, synthetic construct
  source 1..23: mol_type = other RNA
  modified_base 1: mod_base = OTHER; note = 2'-O-methyluridine-3'-phosphorothioate
  modified_base 2: mod_base = OTHER; note = 2'-fluoroadenosine-3'-phosporothioate
  modified_base 3: mod_base = OTHER; note = 2'-O-methylcytidine-3'-phosphorothioate
  modified_base 4: mod_base = OTHER; note = 2'-fluorocytidine-3'-phosphate
  modified_base 5: mod_base = OTHER; note = 2'-O-methyladenosine-3'-phosphate
  modified_base 6: mod_base = OTHER; note = 2'-fluoroadenosine-3'-phosphate
  modified_base 7: mod_base = OTHER; note = 2'-O-methyluridine-3'-phosphate
  modified_base 8: mod_base = OTHER; note = 2'-fluorouridine-3'-phosphate
  modified_base 9: mod_base = OTHER; note = 2'-O-methyluridine-3'-phosphate
  modified_base 10: mod_base = OTHER; note = 2'-fluoroadenosine-3'-phosphate
  modified_base 11: mod_base = OTHER; note = 2'-O-methyluridine-3'-phosphate
  modified_base 12: mod_base = OTHER; note = 2'-fluoroguanosine-3'-phosphate
  modified_base 13: mod_base = OTHER; note = 2'-O-methylcytidine-3'-phosphate
  modified_base 14: mod_base = OTHER; note = 2'-fluorocytidine-3'-phosphate
  modified_base 15: mod_base = OTHER; note = 2'-O-methyluridine-3'-phosphate
  modified_base 16: mod_base = OTHER; note = 2'-fluoroadenosine-3'-phosphate
  modified_base 17: mod_base = OTHER; note = 2'-O-methylcytidine-3'-phosphate
  modified_base 18: mod_base = OTHER; note = 2'-fluoroadenosine-3'-phosphate
  modified_base 19: mod_base = OTHER; note = 2'-O-methylguanosine-3'-phosphate
  modified_base 20: mod_base = OTHER; note = 2'-O-methylcytidine-3'-phosphate
  modified_base 21: mod_base = OTHER; note = 2'-O-methylcytidine-3'-phosphate
  modified_base 22: mod_base = OTHER; note = 2'-O-methyluridine-3'-phosphorothioate
  modified_base 23: mod_base = OTHER; note = 2'-O-methylcytidine-3'-phosphate
taccaatttatgcctacagcctc

SEQ ID NO: 85 - RNA, 21 nt, synthetic construct
  source 1..21: mol_type = other RNA
  modified_base 1: mod_base = OTHER; note = 2'-O-methyluridine-3'-phosphorothioate
  modified_base 2: mod_base = OTHER; note = 2'-fluoroadenosine-3'-phosporothioate
  modified_base 3: mod_base = OTHER; note = 2'-O-methylcytidine-3'-phosphorothioate
  modified_base 4: mod_base = OTHER; note = 2'-O-methylcytidine-3'-phosphate
  modified_base 5: mod_base = OTHER; note = 2'-O-methyladenosine-3'-phosphate
  modified_base 6: mod_base = OTHER; note = 2'-O-methyladenosine-3'-phosphate
  modified_base 7: mod_base = OTHER; note = 2'-O-methyluridine-3'-phosphate
  modified_base 8: mod_base = OTHER; note = 2'-fluorouridine-3'-phosphate
  modified_base 9: mod_base = OTHER; note = 2'-O-methyluridine-3'-phosphate
  modified_base 10: mod_base = OTHER; note = 2'-fluoroadenosine-3'-phosphate
  modified_base 11: mod_base = OTHER; note = 2'-O-methyluridine-3'-phosphate
  modified_base 12: mod_base = OTHER; note = 2'-fluoroguanosine-3'-phosphate
  modified_base 13: mod_base = OTHER; note = 2'-O-methylcytidine-3'-phosphate
  modified_base 14: mod_base = OTHER; note = 2'-fluorocytidine-3'-phosphate
  modified_base 15: mod_base = OTHER; note = 2'-O-methyluridine-3'-phosphate
  modified_base 16: mod_base = OTHER; note = 2'-O-methyladenosine-3'-phosphate
  modified_base 17: mod_base = OTHER; note = 2'-O-methylcytidine-3'-phosphate
  modified_base 18: mod_base = OTHER; note = 2'-O-methyladenosine-3'-phosphate
  modified_base 19: mod_base = OTHER; note = 2'-O-methylguanosine-3'-phosphate
  modified_base 20: mod_base = OTHER; note = 2'-O-methylcytidine-3'-phosphorothioate
  modified_base 21: mod_base = OTHER; note = 2'-O-methylcytidine-3'-phosphate
taccaatttatgcctacagcc

SEQ ID NO: 86 - RNA, 23 nt, synthetic construct
  source 1..23: mol_type = other RNA
  modified_base 1: mod_base = OTHER; note = 2'-O-methyluridine-3'-phosphorothioate
  modified_base 2: mod_base = OTHER; note = 2'-fluoroadenosine-3'-phosporothioate
  modified_base 3: mod_base = OTHER; note = 2'-O-methylcytidine-3'-phosphorothioate
  modified_base 4: mod_base = OTHER; note = 2'-O-methylcytidine-3'-phosphate
  modified_base 5: mod_base = OTHER; note = 2'-O-methyladenosine-3'-phosphate
  modified_base 6: mod_base = OTHER; note = 2'-O-methyladenosine-3'-phosphate
  modified_base 7: mod_base = OTHER; note = 2'-O-methyluridine-3'-phosphate
  modified_base 8: mod_base = OTHER; note = 2'-fluorouridine-3'-phosphate
  modified_base 9: mod_base = OTHER; note = 2'-O-methyluridine-3'-phosphate
  modified_base 10: mod_base = OTHER; note = 2'-fluoroadenosine-3'-phosphate
  modified_base 11: mod_base = OTHER; note = 2'-O-methyluridine-3'-phosphate
  modified_base 12: mod_base = OTHER; note = 2'-fluoroguanosine-3'-phosphate
  modified_base 13: mod_base = OTHER; note = 2'-O-methylcytidine-3'-phosphate
  modified_base 14: mod_base = OTHER; note = 2'-fluorocytidine-3'-phosphate
  modified_base 15: mod_base = OTHER; note = 2'-O-methyluridine-3'-phosphate
  modified_base 16: mod_base = OTHER; note = 2'-O-methyladenosine-3'-phosphate
  modified_base 17: mod_base = OTHER; note = 2'-O-methylcytidine-3'-phosphate
  modified_base 18: mod_base = OTHER; note = 2'-O-methyladenosine-3'-phosphate
  modified_base 19: mod_base = OTHER; note = 2'-O-methylguanosine-3'-phosphate
  modified_base 20: mod_base = OTHER; note = 2'-O-methylcytidine-3'-phosphate
  modified_base 21: mod_base = OTHER; note = 2'-O-methylcytidine-3'-phosphate
  modified_base 22: mod_base = OTHER; note = 2'-O-methyluridine-3'-phosphorothioate
  modified_base 23: mod_base = OTHER; note = 2'-O-methyluridine-3'-phosphate
taccaatttatgcctacagcctt

SEQ ID NO: 87 - RNA, 23 nt, synthetic construct
  source 1..23: mol_type = other RNA
  modified_base 1: mod_base = OTHER; note = 2'-O-methyluridine-3'-phosphorothioate
  modified_base 2: mod_base = OTHER; note = 2'-fluoroadenosine-3'-phosporothioate
  modified_base 3: mod_base = OTHER; note = 2'-O-methylcytidine-3'-phosphorothioate
  modified_base 4: mod_base = OTHER; note = 2'-O-methylcytidine-3'-phosphate
  modified_base 5: mod_base = OTHER; note = 2'-O-methyladenosine-3'-phosphate
  modified_base 6: mod_base = OTHER; note = 2'-O-methyladenosine-3'-phosphate
  modified_base 7: mod_base = OTHER; note = 2'-O-methyluridine-3'-phosphate
  modified_base 8: mod_base = OTHER; note = 2'-fluorouridine-3'-phosphate
  modified_base 9: mod_base = OTHER; note = 2'-O-methyluridine-3'-phosphate
  modified_base 10: mod_base = OTHER; note = 2'-fluoroadenosine-3'-phosphate
  modified_base 11: mod_base = OTHER; note = 2'-O-methyluridine-3'-phosphate
  modified_base 12: mod_base = OTHER; note = 2'-fluoroguanosine-3'-phosphate
  modified_base 13: mod_base = OTHER; note = 2'-O-methylcytidine-3'-phosphate
  modified_base 14: mod_base = OTHER; note = 2'-fluorocytidine-3'-phosphate
  modified_base 15: mod_base = OTHER; note = 2'-O-methyluridine-3'-phosphate
  modified_base 16: mod_base = OTHER; note = 2'-O-methyladenosine-3'-phosphate
  modified_base 17: mod_base = OTHER; note = 2'-O-methylcytidine-3'-phosphate
  modified_base 18: mod_base = OTHER; note = 2'-O-methyladenosine-3'-phosphate
  modified_base 19: mod_base = OTHER; note = 2'-O-methylguanosine-3'-phosphate
  modified_base 20: mod_base = OTHER; note = 2'-O-methylcytidine-3'-phosphate
  modified_base 21: mod_base = OTHER; note = 2'-O-methylcytidine-3'-phosphate
  modified_base 22: mod_base = OTHER; note = 2'-O-methyluridine-3'-phosphorothioate
  modified_base 23: mod_base = OTHER; note = 2'-O-methylcytidine-3'-phosphate
taccaatttatgcctacagcctc

SEQ ID NO: 88 - RNA, 21 nt, synthetic construct
  source 1..21: mol_type = other RNA
  modified_base 1: mod_base = OTHER; note = 2'-O-methyladenosine-3'-phosphorothioate
  modified_base 2: mod_base = OTHER; note = 2'-fluorouridine-3'-phosphorothioate
  modified_base 3: mod_base = OTHER; note = 2'-O-methyluridine-3'-phosphorothioate
  modified_base 4: mod_base = OTHER; note = 2'-O-methylguanosine-3'-phosphate
  modified_base 5: mod_base = OTHER; note = 2'-O-methyladenosine-3'-phosphate
  modified_base 6: mod_base = OTHER; note = 2'-O-methylguanosine-3'-phosphate
  modified_base 7: mod_base = OTHER; note = 2'-O-methyladenosine-3'-phosphate
  modified_base 8: mod_base = OTHER; note = 2'-fluoroguanosine-3'-phosphate
  modified_base 9: mod_base = OTHER; note = 2'-O-methyladenosine-3'-phosphate
  modified_base 10: mod_base = OTHER; note = 2'-fluoroadenosine-3'-phosphate
  modified_base 11: mod_base = OTHER; note = 2'-O-methylguanosine-3'-phosphate
  modified_base 12: mod_base = OTHER; note = 2'-fluorouridine-3'-phosphate
  modified_base 13: mod_base = OTHER; note = 2'-O-methylcytidine-3'-phosphate
  modified_base 14: mod_base = OTHER; note = 2'-fluorocytidine-3'-phosphate
  modified_base 15: mod_base = OTHER; note = 2'-O-methyladenosine-3'-phosphate
  modified_base 16: mod_base = OTHER; note = 2'-O-methylcytidine-3'-phosphate
  modified_base 17: mod_base = OTHER; note = 2'-O-methylcytidine-3'-phosphate
  modified_base 18: mod_base = OTHER; note = 2'-O-methyladenosine-3'-phosphate
  modified_base 19: mod_base = OTHER; note = 2'-O-methylcytidine-3'-phosphate
  modified_base 20: mod_base = OTHER; note = 2'-O-methyluridine-3'-phosphorothioate
  modified_base 21: mod_base = OTHER; note = 2'-O-methyluridine-3'-phosphate
attgagagaagtccaccactt

SEQ ID NO: 89 - RNA, 21 nt, synthetic construct
  source 1..21: mol_type = other RNA
  modified_base 1: mod_base = OTHER; note = 2'-O-methyluridine-3'-phosphorothioate
  modified_base 2: mod_base = OTHER; note = 2'-fluorouridine-3'-phosphorothioate
  modified_base 3: mod_base = OTHER; note = 2'-O-methyluridine-3'-phosphorothioate
  modified_base 4: mod_base = OTHER; note = 2'-fluoroguanosine-3'-phosphate
  modified_base 5: mod_base = OTHER; note = 2'-O-methyladenosine-3'-phosphate
  modified_base 6: mod_base = OTHER; note = 2'-fluoroguanosine-3'-phosphate
  modified_base 7: mod_base = OTHER; note = 2'-O-methyladenosine-3'-phosphate
  modified_base 8: mod_base = OTHER; note = 2'-fluoroguanosine-3'-phosphate
  modified_base 9: mod_base = OTHER; note = 2'-O-methyladenosine-3'-phosphate
  modified_base 10: mod_base = OTHER; note = 2'-fluoroadenosine-3'-phosphate
  modified_base 11: mod_base = OTHER; note = 2'-O-methylguanosine-3'-phosphate
  modified_base 12: mod_base = OTHER; note = 2'-fluorouridine-3'-phosphate
  modified_base 13: mod_base = OTHER; note = 2'-O-methylcytidine-3'-phosphate
  modified_base 14: mod_base = OTHER; note = 2'-fluorocytidine-3'-phosphate
  modified_base 15: mod_base = OTHER; note = 2'-O-methyladenosine-3'-phosphate
  modified_base 16: mod_base = OTHER; note = 2'-fluorocytidine-3'-phosphate
  modified_base 17: mod_base = OTHER; note = 2'-O-methylcytidine-3'-phosphate
  modified_base 18: mod_base = OTHER; note = 2'-fluoroadenosine-3'-phosphate
  modified_base 19: mod_base = OTHER; note = 2'-O-methylcytidine-3'-phosphate
  modified_base 20: mod_base = OTHER; note = 2'-O-methyluridine-3'-phosphorothioate
  modified_base 21: mod_base = OTHER; note = 2'-O-methyluridine-3'-phosphate
tttgagagaagtccaccactt

SEQ ID NO: 90 - RNA, 23 nt, synthetic construct
  source 1..23: mol_type = other RNA
  modified_base 1: mod_base = OTHER; note = 2'-O-methyladenosine-3'-phosphorothioate
  modified_base 2: mod_base = OTHER; note = 2'-fluorouridine-3'-phosphorothioate
  modified_base 3: mod_base = OTHER; note = 2'-O-methyluridine-3'-phosphorothioate
  modified_base 4: mod_base = OTHER; note = 2'-fluoroguanosine-3'-phosphate
  modified_base 5: mod_base = OTHER; note = 2'-O-methyladenosine-3'-phosphate
  modified_base 6: mod_base = OTHER; note = 2'-fluoroguanosine-3'-phosphate
  modified_base 7: mod_base = OTHER; note = 2'-O-methyladenosine-3'-phosphate
  modified_base 8: mod_base = OTHER; note = 2'-fluoroguanosine-3'-phosphate
  modified_base 9: mod_base = OTHER; note = 2'-O-methyladenosine-3'-phosphate
  modified_base 10: mod_base = OTHER; note = 2'-fluoroadenosine-3'-phosphate
  modified_base 11: mod_base = OTHER; note = 2'-O-methylguanosine-3'-phosphate
  modified_base 12: mod_base = OTHER; note = 2'-fluorouridine-3'-phosphate
  modified_base 13: mod_base = OTHER; note = 2'-O-methylcytidine-3'-phosphate
  modified_base 14: mod_base = OTHER; note = 2'-fluorocytidine-3'-phosphate
  modified_base 15: mod_base = OTHER; note = 2'-O-methyladenosine-3'-phosphate
  modified_base 16: mod_base = OTHER; note = 2'-fluorocytidine-3'-phosphate
  modified_base 17: mod_base = OTHER; note = 2'-O-methylcytidine-3'-phosphate
  modified_base 18: mod_base = OTHER; note = 2'-fluoroadenosine-3'-phosphate
  modified_base 19: mod_base = OTHER; note = 2'-O-methylcytidine-3'-phosphate
  modified_base 20: mod_base = OTHER; note = 2'-O-methylguanosine-3'-phosphate
  modified_base 21: mod_base = OTHER; note = 2'-O-methylguanosine-3'-phosphate
  modified_base 22: mod_base = OTHER; note = 2'-O-methyluridine-3'-phosphorothioate
  modified_base 23: mod_base = OTHER; note = 2'-O-methyluridine-3'-phosphate
attgagagaagtccaccacggtt

SEQ ID NO: 91 - RNA, 23 nt, synthetic construct
  source 1..23: mol_type = other RNA
  modified_base 1: mod_base = OTHER; note = 2'-O-methyladenosine-3'-phosphorothioate
  modified_base 2: mod_base = OTHER; note = 2'-fluorouridine-3'-phosphorothioate
  modified_base 3: mod_base = OTHER; note = 2'-O-methyluridine-3'-phosphorothioate
  modified_base 4: mod_base = OTHER; note = 2'-O-methylguanosine-3'-phosphate
  modified_base 5: mod_base = OTHER; note = 2'-O-methyladenosine-3'-phosphate
  modified_base 6: mod_base = OTHER; note = 2'-O-methylguanosine-3'-phosphate
  modified_base 7: mod_base = OTHER; note = 2'-O-methyladenosine-3'-phosphate
  modified_base 8: mod_base = OTHER; note = 2'-fluoroguanosine-3'-phosphate
  modified_base 9: mod_base = OTHER; note = 2'-O-methyladenosine-3'-phosphate
  modified_base 10: mod_base = OTHER; note = 2'-fluoroadenosine-3'-phosphate
  modified_base 11: mod_base = OTHER; note = 2'-O-methylguanosine-3'-phosphate
  modified_base 12: mod_base = OTHER; note = 2'-fluorouridine-3'-phosphate
  modified_base 13: mod_base = OTHER; note = 2'-O-methylcytidine-3'-phosphate
  modified_base 14: mod_base = OTHER; note = 2'-fluorocytidine-3'-phosphate
  modified_base 15: mod_base = OTHER; note = 2'-O-methyladenosine-3'-phosphate
  modified_base 16: mod_base = OTHER; note = 2'-O-methylcytidine-3'-phosphate
  modified_base 17: mod_base = OTHER; note = 2'-O-methylcytidine-3'-phosphate
  modified_base 18: mod_base = OTHER; note = 2'-O-methyladenosine-3'-phosphate
  modified_base 19: mod_base = OTHER; note = 2'-O-methylcytidine-3'-phosphate
  modified_base 20: mod_base = OTHER; note = 2'-O-methylguanosine-3'-phosphate
  modified_base 21: mod_base = OTHER; note = 2'-O-methylguanosine-3'-phosphate
  modified_base 22: mod_base = OTHER; note = 2'-O-methyluridine-3'-phosphorothioate
  modified_base 23: mod_base = OTHER; note = 2'-O-methyluridine-3'-phosphate
attgagagaagtccaccacggtt

SEQ ID NO: 92 - RNA, 23 nt, synthetic construct
  source 1..23: mol_type = other RNA
  modified_base 1: mod_base = OTHER; note = 2'-O-methyladenosine-3'-phosphorothioate
  modified_base 2: mod_base = OTHER; note = 2'-fluorouridine-3'-phosphorothioate
  modified_base 3: mod_base = OTHER; note = 2'-O-methyluridine-3'-phosphorothioate
  modified_base 4: mod_base = OTHER; note = 2'-fluoroguanosine-3'-phosphate
  modified_base 5: mod_base = OTHER; note = 2'-O-methyladenosine-3'-phosphate
  modified_base 6: mod_base = OTHER; note = 2'-fluoroguanosine-3'-phosphate
  modified_base 7: mod_base = OTHER; note = 2'-O-methyladenosine-3'-phosphate
  modified_base 8: mod_base = OTHER; note = 2'-fluoroguanosine-3'-phosphate
  modified_base 9: mod_base = OTHER; note = 2'-O-methyladenosine-3'-phosphate
  modified_base 10: mod_base = OTHER; note = 2'-fluoroadenosine-3'-phosphate
  modified_base 11: mod_base = OTHER; note = 2'-O-methylguanosine-3'-phosphate
  modified_base 12: mod_base = OTHER; note = 2'-fluorouridine-3'-phosphate
  modified_base 13: mod_base = OTHER; note = 2'-O-methylcytidine-3'-phosphate
  modified_base 14: mod_base = OTHER; note = 2'-fluorocytidine-3'-phosphate
  modified_base 15: mod_base = OTHER; note = 2'-O-methyladenosine-3'-phosphate
  modified_base 16: mod_base = OTHER; note = 2'-fluorocytidine-3'-phosphate
  modified_base 17: mod_base = OTHER; note = 2'-O-methylcytidine-3'-phosphate
  modified_base 18: mod_base = OTHER; note = 2'-fluoroadenosine-3'-phosphate
  modified_base 19: mod_base = OTHER; note = 2'-O-methylcytidine-3'-phosphate
  modified_base 20: mod_base = OTHER; note = 2'-O-methylguanosine-3'-phosphate
  modified_base 21: mod_base = OTHER; note = 2'-O-methyladenosine-3'-phosphate
  modified_base 22: mod_base = OTHER; note = 2'-O-methylguanosine-3'-phosphorothioate
  modified_base 23: mod_base = OTHER; note = 2'-O-methyluridine-3'-phosphate
attgagagaagtccaccacgagt

SEQ ID NO: 93 - RNA, 21 nt, synthetic construct
  source 1..21: mol_type = other RNA
  modified_base 1: mod_base = OTHER; note = 2'-O-methyluridine-3'-phosphorothioate
  modified_base 2: mod_base = OTHER; note = 2'-fluoroadenosine-3'-phosporothioate
  modified_base 3: mod_base = OTHER; note = 2'-O-methyluridine-3'-phosphorothioate
  modified_base 4: mod_base = OTHER; note = 2'-fluorouridine-3'-phosphate
  modified_base 5: mod_base = OTHER; note = 2'-O-methylguanosine-3'-phosphate
  modified_base 6: mod_base = OTHER; note = 2'-fluoroadenosine-3'-phosphate
  modified_base 7: mod_base = OTHER; note = 2'-O-methylguanosine-3'-phosphate
  modified_base 8: mod_base = OTHER; note = 2'-fluoroadenosine-3'-phosphate
  modified_base 9: mod_base = OTHER; note = 2'-O-methylguanosine-3'-phosphate
  modified_base 10: mod_base = OTHER; note = 2'-fluoroadenosine-3'-phosphate
  modified_base 11: mod_base = OTHER; note = 2'-O-methyladenosine-3'-phosphate
  modified_base 12: mod_base = OTHER; note = 2'-fluoroguanosine-3'-phosphate
  modified_base 13: mod_base = OTHER; note = 2'-O-methyluridine-3'-phosphate
  modified_base 14: mod_base = OTHER; note = 2'-fluorocytidine-3'-phosphate
  modified_base 15: mod_base = OTHER; note = 2'-O-methylcytidine-3'-phosphate
  modified_base 16: mod_base = OTHER; note = 2'-fluoroadenosine-3'-phosphate
  modified_base 17: mod_base = OTHER; note = 2'-O-methylcytidine-3'-phosphate
  modified_base 18: mod_base = OTHER; note = 2'-fluorocytidine-3'-phosphate
  modified_base 19: mod_base = OTHER; note = 2'-O-methyladenosine-3'-phosphate
  modified_base 20: mod_base = OTHER; note = 2'-fluorocytidine-3'-phosphorothioate
  modified_base 21: mod_base = OTHER; note = 2'-O-methylguanosine-3'-phosphate
tattgagagaagtccaccacg

SEQ ID NO: 94 - RNA, 21 nt, synthetic construct
  source 1..21: mol_type = other RNA
  modified_base 1: mod_base = OTHER; note = 2'-O-methyluridine-3'-phosphorothioate
  modified_base 2: mod_base = OTHER; note = 2'-fluoroadenosine-3'-phosporothioate
  modified_base 3: mod_base = OTHER; note = 2'-O-methyluridine-3'-phosphorothioate
  modified_base 4: mod_base = OTHER; note = 2'-O-methyluridine-3'-phosphate
  modified_base 5: mod_base = OTHER; note = 2'-O-methylguanosine-3'-phosphate
  modified_base 6: mod_base = OTHER; note = 2'-O-methyladenosine-3'-phosphate
  modified_base 7: mod_base = OTHER; note = 2'-O-methylguanosine-3'-phosphate
  modified_base 8: mod_base = OTHER; note = 2'-fluoroadenosine-3'-phosphate
  modified_base 9: mod_base = OTHER; note = 2'-O-methylguanosine-3'-phosphate
  modified_base 10: mod_base = OTHER; note = 2'-fluoroadenosine-3'-phosphate
  modified_base 11: mod_base = OTHER; note = 2'-O-methyladenosine-3'-phosphate
  modified_base 12: mod_base = OTHER; note = 2'-fluoroguanosine-3'-phosphate
  modified_base 13: mod_base = OTHER; note = 2'-O-methyluridine-3'-phosphate
  modified_base 14: mod_base = OTHER; note = 2'-fluorocytidine-3'-phosphate
  modified_base 15: mod_base = OTHER; note = 2'-O-methylcytidine-3'-phosphate
  modified_base 16: mod_base = OTHER; note = 2'-O-methyladenosine-3'-phosphate
  modified_base 17: mod_base = OTHER; note = 2'-O-methylcytidine-3'-phosphate
  modified_base 18: mod_base = OTHER; note = 2'-O-methylcytidine-3'-phosphate
  modified_base 19: mod_base = OTHER; note = 2'-O-methyladenosine-3'-phosphate
  modified_base 20: mod_base = OTHER; note = 2'-O-methylcytidine-3'-phosphorothioate
  modified_base 21: mod_base = OTHER; note = 2'-O-methylguanosine-3'-phosphate
tattgagagaagtccaccacg

SEQ ID NO: 95 - RNA, 23 nt, synthetic construct
  source 1..23: mol_type = other RNA
  modified_base 1: mod_base = OTHER; note = 2'-O-methyluridine-3'-phosphorothioate
  modified_base 2: mod_base = OTHER; note = 2'-fluoroadenosine-3'-phosporothioate
  modified_base 3: mod_base = OTHER; note = 2'-O-methyluridine-3'-phosphorothioate
  modified_base 4: mod_base = OTHER; note = 2'-fluorouridine-3'-phosphate
  modified_base 5: mod_base = OTHER; note = 2'-O-methylguanosine-3'-phosphate
  modified_base 6: mod_base = OTHER; note = 2'-fluoroadenosine-3'-phosphate
  modified_base 7: mod_base = OTHER; note = 2'-O-methylguanosine-3'-phosphate
  modified_base 8: mod_base = OTHER; note = 2'-fluoroadenosine-3'-phosphate
  modified_base 9: mod_base = OTHER; note = 2'-O-methylguanosine-3'-phosphate
  modified_base 10: mod_base = OTHER; note = 2'-fluoroadenosine-3'-phosphate
  modified_base 11: mod_base = OTHER; note = 2'-O-methyladenosine-3'-phosphate
  modified_base 12: mod_base = OTHER; note = 2'-fluoroguanosine-3'-phosphate
  modified_base 13: mod_base = OTHER; note = 2'-O-methyluridine-3'-phosphate
  modified_base 14: mod_base = OTHER; note = 2'-fluorocytidine-3'-phosphate
  modified_base 15: mod_base = OTHER; note = 2'-O-methylcytidine-3'-phosphate
  modified_base 16: mod_base = OTHER; note = 2'-fluoroadenosine-3'-phosphate
  modified_base 17: mod_base = OTHER; note = 2'-O-methylcytidine-3'-phosphate
  modified_base 18: mod_base = OTHER; note = 2'-fluorocytidine-3'-phosphate
  modified_base 19: mod_base = OTHER; note = 2'-O-methyladenosine-3'-phosphate
  modified_base 20: mod_base = OTHER; note = 2'-fluorocytidine-3'-phosphate
  modified_base 21: mod_base = OTHER; note = 2'-O-methylguanosine-3'-phosphate
  modified_base 22: mod_base = OTHER; note = 2'-O-methyluridine-3'-phosphorothioate
  modified_base 23: mod_base = OTHER; note = 2'-O-methyluridine-3'-phosphate
tattgagagaagtccaccacgtt

SEQ ID NO: 96 - RNA, 23 nt, synthetic construct
  source 1..23: mol_type = other RNA
  modified_base 1: mod_base = OTHER; note = 2'-O-methyluridine-3'-phosphorothioate
  modified_base 2: mod_base = OTHER; note = 2'-fluoroadenosine-3'-phosporothioate
  modified_base 3: mod_base = OTHER; note = 2'-O-methyluridine-3'-phosphorothioate
  modified_base 4: mod_base = OTHER; note = 2'-O-methyluridine-3'-phosphate
  modified_base 5: mod_base = OTHER; note = 2'-O-methylguanosine-3'-phosphate
  modified_base 6: mod_base = OTHER; note = 2'-O-methyladenosine-3'-phosphate
  modified_base 7: mod_base = OTHER; note = 2'-O-methylguanosine-3'-phosphate
  modified_base 8: mod_base = OTHER; note = 2'-fluoroadenosine-3'-phosphate
  modified_base 9: mod_base = OTHER; note = 2'-O-methylguanosine-3'-phosphate
  modified_base 10: mod_base = OTHER; note = 2'-fluoroadenosine-3'-phosphate
  modified_base 11: mod_base = OTHER; note = 2'-O-methyladenosine-3'-phosphate
  modified_base 12: mod_base = OTHER; note = 2'-fluoroguanosine-3'-phosphate
  modified_base 13: mod_base = OTHER; note = 2'-O-methyluridine-3'-phosphate
  modified_base 14: mod_base = OTHER; note = 2'-fluorocytidine-3'-phosphate
  modified_base 15: mod_base = OTHER; note = 2'-O-methylcytidine-3'-phosphate
  modified_base 16: mod_base = OTHER; note = 2'-O-methyladenosine-3'-phosphate
  modified_base 17: mod_base = OTHER; note = 2'-O-methylcytidine-3'-phosphate
  modified_base 18: mod_base = OTHER; note = 2'-O-methylcytidine-3'-phosphate
  modified_base 19: mod_base = OTHER; note = 2'-O-methyladenosine-3'-phosphate
  modified_base 20: mod_base = OTHER; note = 2'-O-methylcytidine-3'-phosphate
  modified_base 21: mod_base = OTHER; note = 2'-O-methylguanosine-3'-phosphate
  modified_base 22: mod_base = OTHER; note = 2'-O-methyladenosine-3'-phosphorothioate
  modified_base 23: mod_base = OTHER; note = 2'-O-methylguanosine-3'-phosphate
tattgagagaagtccaccacgag

SEQ ID NO: 97 - RNA, 23 nt, synthetic construct
  source 1..23: mol_type = other RNA
  modified_base 1: mod_base = OTHER; note = 2'-O-methyluridine-3'-phosphorothioate
  modified_base 2: mod_base = OTHER; note = 2'-fluoroadenosine-3'-phosporothioate
  modified_base 3: mod_base = OTHER; note = 2'-O-methyluridine-3'-phosphorothioate
  modified_base 4: mod_base = OTHER; note = 2'-fluorouridine-3'-phosphate
  modified_base 5: mod_base = OTHER; note = 2'-O-methylguanosine-3'-phosphate
  modified_base 6: mod_base = OTHER; note = 2'-fluoroadenosine-3'-phosphate
  modified_base 7: mod_base = OTHER; note = 2'-O-methylguanosine-3'-phosphate
  modified_base 8: mod_base = OTHER; note = 2'-fluoroadenosine-3'-phosphate
  modified_base 9: mod_base = OTHER; note = 2'-O-methylguanosine-3'-phosphate
  modified_base 10: mod_base = OTHER; note = 2'-fluoroadenosine-3'-phosphate
  modified_base 11: mod_base = OTHER; note = 2'-O-methyladenosine-3'-phosphate
  modified_base 12: mod_base = OTHER; note = 2'-fluoroguanosine-3'-phosphate
  modified_base 13: mod_base = OTHER; note = 2'-O-methyluridine-3'-phosphate
  modified_base 14: mod_base = OTHER; note = 2'-fluorocytidine-3'-phosphate
  modified_base 15: mod_base = OTHER; note = 2'-O-methylcytidine-3'-phosphate
  modified_base 16: mod_base = OTHER; note = 2'-fluoroadenosine-3'-phosphate
  modified_base 17: mod_base = OTHER; note = 2'-O-methylcytidine-3'-phosphate
  modified_base 18: mod_base = OTHER; note = 2'-fluorocytidine-3'-phosphate
  modified_base 19: mod_base = OTHER; note = 2'-O-methyladenosine-3'-phosphate
  modified_base 20: mod_base = OTHER; note = 2'-fluorocytidine-3'-phosphate
  modified_base 21: mod_base = OTHER; note = 2'-O-methylguanosine-3'-phosphate
  modified_base 22: mod_base = OTHER; note = 2'-O-methyladenosine-3'-phosphorothioate
  modified_base 23: mod_base = OTHER; note = 2'-O-methylguanosine-3'-phosphate
tattgagagaagtccaccacgag

SEQ ID NO: 98 - RNA, 22 nt, synthetic construct
  source 1..22: mol_type = other RNA
  modified_base 1: mod_base = OTHER; note = 2'-O-methyluridine-3'-phosphorothioate
  modified_base 2: mod_base = OTHER; note = 2'-fluoroadenosine-3'-phosporothioate
  modified_base 3: mod_base = OTHER; note = 2'-O-methyluridine-3'-phosphorothioate
  modified_base 4: mod_base = OTHER; note = 2'-fluorouridine-3'-phosphate
  modified_base 5: mod_base = OTHER; note = 2'-O-methylguanosine-3'-phosphate
  modified_base 6: mod_base = OTHER; note = 2'-fluoroadenosine-3'-phosphate
  modified_base 7: mod_base = OTHER; note = 2'-O-methylguanosine-3'-phosphate
  modified_base 8: mod_base = OTHER; note = 2'-fluoroadenosine-3'-phosphate
  modified_base 9: mod_base = OTHER; note = 2'-O-methylguanosine-3'-phosphate
  modified_base 10: mod_base = OTHER; note = 2'-fluoroadenosine-3'-phosphate
  modified_base 11: mod_base = OTHER; note = 2'-O-methyladenosine-3'-phosphate
  modified_base 12: mod_base = OTHER; note = 2'-fluoroguanosine-3'-phosphate
  modified_base 13: mod_base = OTHER; note = 2'-O-methyluridine-3'-phosphate
  modified_base 14: mod_base = OTHER; note = 2'-fluorocytidine-3'-phosphate
  modified_base 15: mod_base = OTHER; note = 2'-O-methylcytidine-3'-phosphate
  modified_base 16: mod_base = OTHER; note = 2'-fluoroadenosine-3'-phosphate
  modified_base 17: mod_base = OTHER; note = 2'-O-methylcytidine-3'-phosphate
  modified_base 18: mod_base = OTHER; note = 2'-fluorocytidine-3'-phosphate
  modified_base 19: mod_base = OTHER; note = 2'-O-methyladenosine-3'-phosphate
  modified_base 20: mod_base = OTHER; note = 2'-fluorocytidine-3'-phosphate
  modified_base 21: mod_base = OTHER; note = 2'-O-methylguanosine-3'-phosphorothioate
  modified_base 22: mod_base = OTHER; note = 2'-O-methyladenosine-3'-phosphate
tattgagagaagtccaccacga

SEQ ID NO: 99 - RNA, 22 nt, synthetic construct
  source 1..22: mol_type = other RNA
  modified_base 1: mod_base = OTHER; note = 2'-O-methyluridine-3'-phosphorothioate
  modified_base 2: mod_base = OTHER; note = 2'-fluoroadenosine-3'-phosporothioate
  modified_base 3: mod_base = OTHER; note = 2'-O-methyluridine-3'-phosphorothioate
  modified_base 4: mod_base = OTHER; note = 2'-O-methyluridine-3'-phosphate
  modified_base 5: mod_base = OTHER; note = 2'-O-methylguanosine-3'-phosphate
  modified_base 6: mod_base = OTHER; note = 2'-O-methyladenosine-3'-phosphate
  modified_base 7: mod_base = OTHER; note = 2'-O-methylguanosine-3'-phosphate
  modified_base 8: mod_base = OTHER; note = 2'-fluoroadenosine-3'-phosphate
  modified_base 9: mod_base = OTHER; note = 2'-O-methylguanosine-3'-phosphate
  modified_base 10: mod_base = OTHER; note = 2'-fluoroadenosine-3'-phosphate
  modified_base 11: mod_base = OTHER; note = 2'-O-methyladenosine-3'-phosphate
  modified_base 12: mod_base = OTHER; note = 2'-fluoroguanosine-3'-phosphate
  modified_base 13: mod_base = OTHER; note = 2'-O-methyluridine-3'-phosphate
  modified_base 14: mod_base = OTHER; note = 2'-fluorocytidine-3'-phosphate
  modified_base 15: mod_base = OTHER; note = 2'-O-methylcytidine-3'-phosphate
  modified_base 16: mod_base = OTHER; note = 2'-O-methyladenosine-3'-phosphate
  modified_base 17: mod_base = OTHER; note = 2'-O-methylcytidine-3'-phosphate
  modified_base 18: mod_base = OTHER; note = 2'-O-methylcytidine-3'-phosphate
  modified_base 19: mod_base = OTHER; note = 2'-O-methyladenosine-3'-phosphate
  modified_base 20: mod_base = OTHER; note = 2'-O-methylcytidine-3'-phosphate
  modified_base 21: mod_base = OTHER; note = 2'-O-methylguanosine-3'-phosphorothioate
  modified_base 22: mod_base = OTHER; note = 2'-O-methyladenosine-3'-phosphate
tattgagagaagtccaccacga

SEQ ID NO: 100 - RNA, 21 nt, synthetic construct
  source 1..21: mol_type = other RNA
  modified_base 1: mod_base = OTHER; note = 2'-O-methyladenosine-3'-phosphorothioate
  modified_base 2: mod_base = OTHER; note = 2'-fluoroguanosine-3'-phosphorothioate
  modified_base 3: mod_base = OTHER; note = 2'-O-methyladenosine-3'-phosphorothioate
  modified_base 4: mod_base = OTHER; note = 2'-fluoroadenosine-3'-phosphate
  modified_base 5: mod_base = OTHER; note = 2'-O-methyladenosine-3'-phosphate
  modified_base 6: mod_base = OTHER; note = 2'-fluoroadenosine-3'-phosphate
  modified_base 7: mod_base = OTHER; note = 2'-O-methyluridine-3'-phosphate
  modified_base 8: mod_base = OTHER; note = 2'-O-methyluridine-3'-phosphate
  modified_base 9: mod_base = OTHER; note = 2'-O-methylguanosine-3'-phosphate
  modified_base 10: mod_base = OTHER; note = 2'-O-methyladenosine-3'-phosphate
  modified_base 11: mod_base = OTHER; note = 2'-O-methylguanosine-3'-phosphate
  modified_base 12: mod_base = OTHER; note = 2'-fluoroadenosine-3'-phosphate
  modified_base 13: mod_base = OTHER; note = 2'-O-methylguanosine-3'-phosphate
  modified_base 14: mod_base = OTHER; note = 2'-fluoroadenosine-3'-phosphate
  modified_base 15: mod_base = OTHER; note = 2'-O-methyladenosine-3'-phosphate
  modified_base 16: mod_base = OTHER; note = 2'-fluoroguanosine-3'-phosphate
  modified_base 17: mod_base = OTHER; note = 2'-O-methyluridine-3'-phosphate
  modified_base 18: mod_base = OTHER; note = 2'-fluorocytidine-3'-phosphate
  modified_base 19: mod_base = OTHER; note = 2'-O-methylcytidine-3'-phosphate
  modified_base 20: mod_base = OTHER; note = 2'-fluoroadenosine-3'-phosporothioate
  modified_base 21: mod_base = OTHER; note = 2'-O-methylcytidine-3'-phosphate
agaaaattgagagaagtccac

SEQ ID NO: 101 - RNA, 21 nt, synthetic construct
  source 1..21: mol_type = other RNA
  modified_base 1: mod_base = OTHER; note = 2'-O-methyluridine-3'-phosphorothioate
  modified_base 2: mod_base = OTHER; note = 2'-fluoroadenosine-3'-phosporothioate
  modified_base 3: mod_base = OTHER; note = 2'-O-methylcytidine-3'-phosphorothioate
  modified_base 4: mod_base = OTHER; note = 2'-fluorocytidine-3'-phosphate
  modified_base 5: mod_base = OTHER; note = 2'-O-methyladenosine-3'-phosphate
  modified_base 6: mod_base = OTHER; note = 2'-fluoroadenosine-3'-phosphate
  modified_base 7: mod_base = OTHER; note = 2'-O-methyluridine-3'-phosphate
  modified_base 8: mod_base = OTHER; note = 2'-O-methyluridine-3'-phosphate
  modified_base 9: mod_base = OTHER; note = 2'-O-methyluridine-3'-phosphate
  modified_base 10: mod_base = OTHER; note = 2'-O-methyladenosine-3'-phosphate
  modified_base 11: mod_base = OTHER; note = 2'-O-methyluridine-3'-phosphate
  modified_base 12: mod_base = OTHER; note = 2'-fluoroguanosine-3'-phosphate
  modified_base 13: mod_base = OTHER; note = 2'-O-methylcytidine-3'-phosphate
  modified_base 14: mod_base = OTHER; note = 2'-fluorocytidine-3'-phosphate
  modified_base 15: mod_base = OTHER; note = 2'-O-methyluridine-3'-phosphate
  modified_base 16: mod_base = OTHER; note = 2'-fluoroadenosine-3'-phosphate
  modified_base 17: mod_base = OTHER; note = 2'-O-methylcytidine-3'-phosphate
  modified_base 18: mod_base = OTHER; note = 2'-fluoroadenosine-3'-phosphate
  modified_base 19: mod_base = OTHER; note = 2'-O-methylguanosine-3'-phosphate
  modified_base 20: mod_base = OTHER; note = 2'-O-methyluridine-3'-phosphorothioate
  modified_base 21: mod_base = OTHER; note = 2'-O-methyluridine-3'-phosphate
taccaatttatgcctacagtt

SEQ ID NO: 102 - RNA, 21 nt, synthetic construct
  source 1..21: mol_type = other RNA
  modified_base 1: mod_base = OTHER; note = 2'-O-methyluridine-3'-phosphorothioate
  modified_base 2: mod_base = OTHER; note = 2'-fluoroadenosine-3'-phosporothioate
  modified_base 3: mod_base = OTHER; note = 2'-O-methylcytidine-3'-phosphorothioate
  modified_base 4: mod_base = OTHER; note = 2'-fluorocytidine-3'-phosphate
  modified_base 5: mod_base = OTHER; note = 2'-O-methyladenosine-3'-phosphate
  modified_base 6: mod_base = OTHER; note = 2'-fluoroadenosine-3'-phosphate
  modified_base 7: mod_base = OTHER; note = 2'-O-methyluridine-3'-phosphate
  modified_base 8: mod_base = OTHER; note = 2'-O-methyluridine-3'-phosphate
  modified_base 9: mod_base = OTHER; note = 2'-O-methyluridine-3'-phosphate
  modified_base 10: mod_base = OTHER; note = 2'-O-methyladenosine-3'-phosphate
  modified_base 11: mod_base = OTHER; note = 2'-O-methyluridine-3'-phosphate
  modified_base 12: mod_base = OTHER; note = 2'-fluoroguanosine-3'-phosphate
  modified_base 13: mod_base = OTHER; note = 2'-O-methylcytidine-3'-phosphate
  modified_base 14: mod_base = OTHER; note = 2'-fluorocytidine-3'-phosphate
  modified_base 15: mod_base = OTHER; note = 2'-O-methyluridine-3'-phosphate
  modified_base 16: mod_base = OTHER; note = 2'-fluoroadenosine-3'-phosphate
  modified_base 17: mod_base = OTHER; note = 2'-O-methylcytidine-3'-phosphate
  modified_base 18: mod_base = OTHER; note = 2'-fluoroadenosine-3'-phosphate
  modified_base 19: mod_base = OTHER; note = 2'-O-methylguanosine-3'-phosphate
  modified_base 20: mod_base = OTHER; note = 2'-O-methylcytidine-3'-phosphorothioate
  modified_base 21: mod_base = OTHER; note = 2'-O-methylcytidine-3'-phosphate
taccaatttatgcctacagcc

SEQ ID NO: 103 - RNA, 22 nt, synthetic construct
  source 1..22: mol_type = other RNA
  modified_base 1: mod_base = OTHER; note = 2'-O-methyluridine-3'-phosphorothioate
  modified_base 2: mod_base = OTHER; note = 2'-fluoroadenosine-3'-phosporothioate
  modified_base 3: mod_base = OTHER; note = 2'-O-methylcytidine-3'-phosphorothioate
  modified_base 4: mod_base = OTHER; note = 2'-fluorocytidine-3'-phosphate
  modified_base 5: mod_base = OTHER; note = 2'-O-methyladenosine-3'-phosphate
  modified_base 6: mod_base = OTHER; note = 2'-fluoroadenosine-3'-phosphate
  modified_base 7: mod_base = OTHER; note = 2'-O-methyluridine-3'-phosphate
  modified_base 8: mod_base = OTHER; note = 2'-O-methyluridine-3'-phosphate
  modified_base 9: mod_base = OTHER; note = 2'-O-methyluridine-3'-phosphate
  modified_base 10: mod_base = OTHER; note = 2'-O-methyladenosine-3'-phosphate
  modified_base 11: mod_base = OTHER; note = 2'-O-methyluridine-3'-phosphate
  modified_base 12: mod_base = OTHER; note = 2'-fluoroguanosine-3'-phosphate
  modified_base 13: mod_base = OTHER; note = 2'-O-methylcytidine-3'-phosphate
  modified_base 14: mod_base = OTHER; note = 2'-fluorocytidine-3'-phosphate
  modified_base 15: mod_base = OTHER; note = 2'-O-methyluridine-3'-phosphate
  modified_base 16: mod_base = OTHER; note = 2'-fluoroadenosine-3'-phosphate
  modified_base 17: mod_base = OTHER; note = 2'-O-methylcytidine-3'-phosphate
  modified_base 18: mod_base = OTHER; note = 2'-fluoroadenosine-3'-phosphate
  modified_base 19: mod_base = OTHER; note = 2'-O-methylguanosine-3'-phosphate
  modified_base 20: mod_base = OTHER; note = 2'-O-methylcytidine-3'-phosphate
  modified_base 21: mod_base = OTHER; note = 2'-O-methyluridine-3'-phosphorothioate
  modified_base 22: mod_base = OTHER; note = 2'-O-methyluridine-3'-phosphate
taccaatttatgcctacagctt

SEQ ID NO: 104 - RNA, 22 nt, synthetic construct
  source 1..22: mol_type = other RNA
  modified_base 1: mod_base = OTHER; note = 2'-O-methyluridine-3'-phosphorothioate
  modified_base 2: mod_base = OTHER; note = 2'-fluoroadenosine-3'-phosporothioate
  modified_base 3: mod_base = OTHER; note = 2'-O-methylcytidine-3'-phosphorothioate
  modified_base 4: mod_base = OTHER; note = 2'-fluorocytidine-3'-phosphate
  modified_base 5: mod_base = OTHER; note = 2'-O-methyladenosine-3'-phosphate
  modified_base 6: mod_base = OTHER; note = 2'-fluoroadenosine-3'-phosphate
  modified_base 7: mod_base = OTHER; note = 2'-O-methyluridine-3'-phosphate
  modified_base 8: mod_base = OTHER; note = 2'-O-methyluridine-3'-phosphate
  modified_base 9: mod_base = OTHER; note = 2'-O-methyluridine-3'-phosphate
  modified_base 10: mod_base = OTHER; note = 2'-O-methyladenosine-3'-phosphate
  modified_base 11: mod_base = OTHER; note = 2'-O-methyluridine-3'-phosphate
  modified_base 12: mod_base = OTHER; note = 2'-fluoroguanosine-3'-phosphate
  modified_base 13: mod_base = OTHER; note = 2'-O-methylcytidine-3'-phosphate
  modified_base 14: mod_base = OTHER; note = 2'-fluorocytidine-3'-phosphate
  modified_base 15: mod_base = OTHER; note = 2'-O-methyluridine-3'-phosphate
  modified_base 16: mod_base = OTHER; note = 2'-fluoroadenosine-3'-phosphate
  modified_base 17: mod_base = OTHER; note = 2'-O-methylcytidine-3'-phosphate
  modified_base 18: mod_base = OTHER; note = 2'-fluoroadenosine-3'-phosphate
  modified_base 19: mod_base = OTHER; note = 2'-O-methylguanosine-3'-phosphate
  modified_base 20: mod_base = OTHER; note = 2'-O-methylcytidine-3'-phosphate
  modified_base 21: mod_base = OTHER; note = 2'-O-methylcytidine-3'-phosphorothioate
  modified_base 22: mod_base = OTHER; note = 2'-O-methyluridine-3'-phosphate
taccaatttatgcctacagcct

SEQ ID NO: 105 - RNA, 23 nt, synthetic construct
  source 1..23: mol_type = other RNA
  modified_base 1: mod_base = OTHER; note = 2'-O-methyluridine-3'-phosphorothioate
  modified_base 2: mod_base = OTHER; note = 2'-fluoroadenosine-3'-phosporothioate
  modified_base 3: mod_base = OTHER; note = 2'-O-methylcytidine-3'-phosphorothioate
  modified_base 4: mod_base = OTHER; note = 2'-fluorocytidine-3'-phosphate
  modified_base 5: mod_base = OTHER; note = 2'-O-methyladenosine-3'-phosphate
  modified_base 6: mod_base = OTHER; note = 2'-fluoroadenosine-3'-phosphate
  modified_base 7: mod_base = OTHER; note = 2'-O-methyluridine-3'-phosphate
  modified_base 8: mod_base = OTHER; note = 2'-O-methyluridine-3'-phosphate
  modified_base 9: mod_base = OTHER; note = 2'-O-methyluridine-3'-phosphate
  modified_base 10: mod_base = OTHER; note = 2'-O-methyladenosine-3'-phosphate
  modified_base 11: mod_base = OTHER; note = 2'-O-methyluridine-3'-phosphate
  modified_base 12: mod_base = OTHER; note = 2'-fluoroguanosine-3'-phosphate
  modified_base 13: mod_base = OTHER; note = 2'-O-methylcytidine-3'-phosphate
  modified_base 14: mod_base = OTHER; note = 2'-fluorocytidine-3'-phosphate
  modified_base 15: mod_base = OTHER; note = 2'-O-methyluridine-3'-phosphate
  modified_base 16: mod_base = OTHER; note = 2'-fluoroadenosine-3'-phosphate
  modified_base 17: mod_base = OTHER; note = 2'-O-methylcytidine-3'-phosphate
  modified_base 18: mod_base = OTHER; note = 2'-fluoroadenosine-3'-phosphate
  modified_base 19: mod_base = OTHER; note = 2'-O-methylguanosine-3'-phosphate
  modified_base 20: mod_base = OTHER; note = 2'-O-methylcytidine-3'-phosphate
  modified_base 21: mod_base = OTHER; note = 2'-O-methylcytidine-3'-phosphate
  modified_base 22: mod_base = OTHER; note = 2'-O-methyluridine-3'-phosphorothioate
  modified_base 23: mod_base = OTHER; note = 2'-O-methyluridine-3'-phosphate
taccaatttatgcctacagcctt

SEQ ID NO: 106 - RNA, 23 nt, synthetic construct
  source 1..23: mol_type = other RNA
  modified_base 1: mod_base = OTHER; note = 2'-O-methyluridine-3'-phosphorothioate
  modified_base 2: mod_base = OTHER; note = 2'-fluoroadenosine-3'-phosporothioate
  modified_base 3: mod_base = OTHER; note = 2'-O-methylcytidine-3'-phosphorothioate
  modified_base 4: mod_base = OTHER; note = 2'-fluorocytidine-3'-phosphate
  modified_base 5: mod_base = OTHER; note = 2'-O-methyladenosine-3'-phosphate
  modified_base 6: mod_base = OTHER; note = 2'-fluoroadenosine-3'-phosphate
  modified_base 7: mod_base = OTHER; note = 2'-O-methyluridine-3'-phosphate
  modified_base 8: mod_base = OTHER; note = 2'-O-methyluridine-3'-phosphate
  modified_base 9: mod_base = OTHER; note = 2'-O-methyluridine-3'-phosphate
  modified_base 10: mod_base = OTHER; note = 2'-O-methyladenosine-3'-phosphate
  modified_base 11: mod_base = OTHER; note = 2'-O-methyluridine-3'-phosphate
  modified_base 12: mod_base = OTHER; note = 2'-fluoroguanosine-3'-phosphate
  modified_base 13: mod_base = OTHER; note = 2'-O-methylcytidine-3'-phosphate
  modified_base 14: mod_base = OTHER; note = 2'-fluorocytidine-3'-phosphate
  modified_base 15: mod_base = OTHER; note = 2'-O-methyluridine-3'-phosphate
  modified_base 16: mod_base = OTHER; note = 2'-fluoroadenosine-3'-phosphate
  modified_base 17: mod_base = OTHER; note = 2'-O-methylcytidine-3'-phosphate
  modified_base 18: mod_base = OTHER; note = 2'-fluoroadenosine-3'-phosphate
  modified_base 19: mod_base = OTHER; note = 2'-O-methylguanosine-3'-phosphate
  modified_base 20: mod_base = OTHER; note = 2'-O-methylcytidine-3'-phosphate
  modified_base 21: mod_base = OTHER; note = 2'-O-methylcytidine-3'-phosphate
  modified_base 22: mod_base = OTHER; note = 2'-O-methyluridine-3'-phosphorothioate
  modified_base 23: mod_base = OTHER; note = 2'-O-methylcytidine-3'-phosphate
taccaatttatgcctacagcctc

SEQ ID NO: 107 - RNA, 21 nt, synthetic construct
  source 1..21: mol_type = other RNA
  modified_base 1: mod_base = OTHER; note = cyclopropyl phosphonate-2'-O-methyluridine-3'-phosphorothioate
  modified_base 2: mod_base = OTHER; note = 2'-fluoroadenosine-3'-phosporothioate
  modified_base 3: mod_base = OTHER; note = 2'-O-methylcytidine-3'-phosphorothioate
  modified_base 4: mod_base = OTHER; note = 2'-fluorocytidine-3'-phosphate
  modified_base 5: mod_base = OTHER; note = 2'-O-methyladenosine-3'-phosphate
  modified_base 6: mod_base = OTHER; note = 2'-fluoroadenosine-3'-phosphate
  modified_base 7: mod_base = OTHER; note = 2'-O-methyluridine-3'-phosphate
  modified_base 8: mod_base = OTHER; note = 2'-fluorouridine-3'-phosphate
  modified_base 9: mod_base = OTHER; note = 2'-O-methyluridine-3'-phosphate
  modified_base 10: mod_base = OTHER; note = 2'-fluoroadenosine-3'-phosphate
  modified_base 11: mod_base = OTHER; note = 2'-O-methyluridine-3'-phosphate
  modified_base 12: mod_base = OTHER; note = 2'-fluoroguanosine-3'-phosphate
  modified_base 13: mod_base = OTHER; note = 2'-O-methylcytidine-3'-phosphate
  modified_base 14: mod_base = OTHER; note = 2'-fluorocytidine-3'-phosphate
  modified_base 15: mod_base = OTHER; note = 2'-O-methyluridine-3'-phosphate
  modified_base 16: mod_base = OTHER; note = 2'-fluoroadenosine-3'-phosphate
  modified_base 17: mod_base = OTHER; note = 2'-O-methylcytidine-3'-phosphate
  modified_base 18: mod_base = OTHER; note = 2'-fluoroadenosine-3'-phosphate
  modified_base 19: mod_base = OTHER; note = 2'-O-methylguanosine-3'-phosphate
  modified_base 20: mod_base = OTHER; note = 2'-O-methyluridine-3'-phosphorothioate
  modified_base 21: mod_base = OTHER; note = 2'-O-methyluridine-3'-phosphate
taccaatttatgcctacagtt

SEQ ID NO: 108 - RNA, 21 nt, synthetic construct
  source 1..21: mol_type = other RNA
  modified_base 1: mod_base = OTHER; note = cyclopropyl phosphonate-2'-O-methyluridine-3'-phosphorothioate
  modified_base 2: mod_base = OTHER; note = 2'-fluoroadenosine-3'-phosporothioate
  modified_base 3: mod_base = OTHER; note = 2'-O-methyluridine-3'-phosphorothioate
  modified_base 4: mod_base = OTHER; note = 2'-fluorouridine-3'-phosphate
  modified_base 5: mod_base = OTHER; note = 2'-O-methylguanosine-3'-phosphate
  modified_base 6: mod_base = OTHER; note = 2'-fluoroadenosine-3'-phosphate
  modified_base 7: mod_base = OTHER; note = 2'-O-methylguanosine-3'-phosphate
  modified_base 8: mod_base = OTHER; note = 2'-fluoroadenosine-3'-phosphate
  modified_base 9: mod_base = OTHER; note = 2'-O-methylguanosine-3'-phosphate
  modified_base 10: mod_base = OTHER; note = 2'-fluoroadenosine-3'-phosphate
  modified_base 11: mod_base = OTHER; note = 2'-O-methyladenosine-3'-phosphate
  modified_base 12: mod_base = OTHER; note = 2'-fluoroguanosine-3'-phosphate
  modified_base 13: mod_base = OTHER; note = 2'-O-methyluridine-3'-phosphate
  modified_base 14: mod_base = OTHER; note = 2'-fluorocytidine-3'-phosphate
  modified_base 15: mod_base = OTHER; note = 2'-O-methylcytidine-3'-phosphate
  modified_base 16: mod_base = OTHER; note = 2'-fluoroadenosine-3'-phosphate
  modified_base 17: mod_base = OTHER; note = 2'-O-methylcytidine-3'-phosphate
  modified_base 18: mod_base = OTHER; note = 2'-fluorocytidine-3'-phosphate
  modified_base 19: mod_base = OTHER; note = 2'-O-methyladenosine-3'-phosphate
  modified_base 20: mod_base = OTHER; note = 2'-fluorocytidine-3'-phosphorothioate
  modified_base 21: mod_base = OTHER; note = 2'-O-methylguanosine-3'-phosphate
tattgagagaagtccaccacg

SEQ ID NO: 109 - RNA, 21 nt, synthetic construct
  source 1..21: mol_type = other RNA
  modified_base 1: mod_base = OTHER; note = 2'-O-methyluridine-3'-phosphorothioate
  modified_base 2: mod_base = OTHER; note = 2'-fluoroadenosine-3'-phosporothioate
  modified_base 3: mod_base = OTHER; note = 2'-O-methyluridine-3'-phosphorothioate
  modified_base 4: mod_base = OTHER; note = 2'-fluorouridine-3'-phosphate
  modified_base 5: mod_base = OTHER; note = 2'-O-methylguanosine-3'-phosphate
  modified_base 6: mod_base = OTHER; note = 2'-fluoroadenosine-3'-phosphate
  modified_base 7: mod_base = OTHER; note = 2'-O-methylguanosine-3'-phosphate
  modified_base 8: mod_base = OTHER; note = 2'-O-methyladenosine-3'-phosphate
  modified_base 9: mod_base = OTHER; note = 2'-O-methylguanosine-3'-phosphate
  modified_base 10: mod_base = OTHER; note = 2'-O-methyladenosine-3'-phosphate
  modified_base 11: mod_base = OTHER; note = 2'-O-methyladenosine-3'-phosphate
  modified_base 12: mod_base = OTHER; note = 2'-fluoroguanosine-3'-phosphate
  modified_base 13: mod_base = OTHER; note = 2'-O-methyluridine-3'-phosphate
  modified_base 14: mod_base = OTHER; note = 2'-fluorocytidine-3'-phosphate
  modified_base 15: mod_base = OTHER; note = 2'-O-methylcytidine-3'-phosphate
  modified_base 16: mod_base = OTHER; note = 2'-fluoroadenosine-3'-phosphate
  modified_base 17: mod_base = OTHER; note = 2'-O-methylcytidine-3'-phosphate
  modified_base 18: mod_base = OTHER; note = 2'-fluorocytidine-3'-phosphate
  modified_base 19: mod_base = OTHER; note = 2'-O-methyladenosine-3'-phosphate
  modified_base 20: mod_base = OTHER; note = 2'-O-methyluridine-3'-phosphorothioate
  modified_base 21: mod_base = OTHER; note = 2'-O-methyluridine-3'-phosphate
tattgagagaagtccaccatt

SEQ ID NO: 110 - RNA, 21 nt, synthetic construct
  source 1..21: mol_type = other RNA
  modified_base 1: mod_base = OTHER; note = 2'-O-methyluridine-3'-phosphorothioate
  modified_base 2: mod_base = OTHER; note = 2'-fluoroadenosine-3'-phosporothioate
  modified_base 3: mod_base = OTHER; note = 2'-O-methyluridine-3'-phosphorothioate
  modified_base 4: mod_base = OTHER; note = 2'-fluorouridine-3'-phosphate
  modified_base 5: mod_base = OTHER; note = 2'-O-methylguanosine-3'-phosphate
  modified_base 6: mod_base = OTHER; note = 2'-fluoroadenosine-3'-phosphate
  modified_base 7: mod_base = OTHER; note = 2'-O-methylguanosine-3'-phosphate
  modified_base 8: mod_base = OTHER; note = 2'-O-methyladenosine-3'-phosphate
  modified_base 9: mod_base = OTHER; note = 2'-O-methylguanosine-3'-phosphate
  modified_base 10: mod_base = OTHER; note = 2'-O-methyladenosine-3'-phosphate
  modified_base 11: mod_base = OTHER; note = 2'-O-methyladenosine-3'-phosphate
  modified_base 12: mod_base = OTHER; note = 2'-fluoroguanosine-3'-phosphate
  modified_base 13: mod_base = OTHER; note = 2'-O-methyluridine-3'-phosphate
  modified_base 14: mod_base = OTHER; note = 2'-fluorocytidine-3'-phosphate
  modified_base 15: mod_base = OTHER; note = 2'-O-methylcytidine-3'-phosphate
  modified_base 16: mod_base = OTHER; note = 2'-fluoroadenosine-3'-phosphate
  modified_base 17: mod_base = OTHER; note = 2'-O-methylcytidine-3'-phosphate
  modified_base 18: mod_base = OTHER; note = 2'-fluorocytidine-3'-phosphate
  modified_base 19: mod_base = OTHER; note = 2'-O-methyladenosine-3'-phosphate
  modified_base 20: mod_base = OTHER; note = 2'-O-methylcytidine-3'-phosphorothioate
  modified_base 21: mod_base = OTHER; note = 2'-O-methylguanosine-3'-phosphate
tattgagagaagtccaccacg

SEQ ID NO: 111 - RNA, 22 nt, synthetic construct
  source 1..22: mol_type = other RNA
  modified_base 1: mod_base = OTHER; note = 2'-O-methyluridine-3'-phosphorothioate
  modified_base 2: mod_base = OTHER; note = 2'-fluoroadenosine-3'-phosporothioate
  modified_base 3: mod_base = OTHER; note = 2'-O-methyluridine-3'-phosphorothioate
  modified_base 4: mod_base = OTHER; note = 2'-fluorouridine-3'-phosphate
  modified_base 5: mod_base = OTHER; note = 2'-O-methylguanosine-3'-phosphate
  modified_base 6: mod_base = OTHER; note = 2'-fluoroadenosine-3'-phosphate
  modified_base 7: mod_base = OTHER; note = 2'-O-methylguanosine-3'-phosphate
  modified_base 8: mod_base = OTHER; note = 2'-O-methyladenosine-3'-phosphate
  modified_base 9: mod_base = OTHER; note = 2'-O-methylguanosine-3'-phosphate
  modified_base 10: mod_base = OTHER; note = 2'-O-methyladenosine-3'-phosphate
  modified_base 11: mod_base = OTHER; note = 2'-O-methyladenosine-3'-phosphate
  modified_base 12: mod_base = OTHER; note = 2'-fluoroguanosine-3'-phosphate
  modified_base 13: mod_base = OTHER; note = 2'-O-methyluridine-3'-phosphate
  modified_base 14: mod_base = OTHER; note = 2'-fluorocytidine-3'-phosphate
  modified_base 15: mod_base = OTHER; note = 2'-O-methylcytidine-3'-phosphate
  modified_base 16: mod_base = OTHER; note = 2'-fluoroadenosine-3'-phosphate
  modified_base 17: mod_base = OTHER; note = 2'-O-methylcytidine-3'-phosphate
  modified_base 18: mod_base = OTHER; note = 2'-fluorocytidine-3'-phosphate
  modified_base 19: mod_base = OTHER; note = 2'-O-methyladenosine-3'-phosphate
  modified_base 20: mod_base = OTHER; note = 2'-O-methylcytidine-3'-phosphorothioate
  modified_base 21: mod_base = OTHER; note = 2'-O-methyluridine-3'-phosphorothioate
  modified_base 22: mod_base = OTHER; note = 2'-O-methyluridine-3'-phosphate
tattgagagaagtccaccactt

SEQ ID NO: 112 - RNA, 22 nt, synthetic construct
  source 1..22: mol_type = other RNA
  modified_base 1: mod_base = OTHER; note = 2'-O-methyluridine-3'-phosphorothioate
  modified_base 2: mod_base = OTHER; note = 2'-fluoroadenosine-3'-phosporothioate
  modified_base 3: mod_base = OTHER; note = 2'-O-methyluridine-3'-phosphorothioate
  modified_base 4: mod_base = OTHER; note = 2'-fluorouridine-3'-phosphate
  modified_base 5: mod_base = OTHER; note = 2'-O-methylguanosine-3'-phosphate
  modified_base 6: mod_base = OTHER; note = 2'-fluoroadenosine-3'-phosphate
  modified_base 7: mod_base = OTHER; note = 2'-O-methylguanosine-3'-phosphate
  modified_base 8: mod_base = OTHER; note = 2'-O-methyladenosine-3'-phosphate
  modified_base 9: mod_base = OTHER; note = 2'-O-methylguanosine-3'-phosphate
  modified_base 10: mod_base = OTHER; note = 2'-O-methyladenosine-3'-phosphate
  modified_base 11: mod_base = OTHER; note = 2'-O-methyladenosine-3'-phosphate
  modified_base 12: mod_base = OTHER; note = 2'-fluoroguanosine-3'-phosphate
  modified_base 13: mod_base = OTHER; note = 2'-O-methyluridine-3'-phosphate
  modified_base 14: mod_base = OTHER; note = 2'-fluorocytidine-3'-phosphate
  modified_base 15: mod_base = OTHER; note = 2'-O-methylcytidine-3'-phosphate
  modified_base 16: mod_base = OTHER; note = 2'-fluoroadenosine-3'-phosphate
  modified_base 17: mod_base = OTHER; note = 2'-O-methylcytidine-3'-phosphate
  modified_base 18: mod_base = OTHER; note = 2'-fluorocytidine-3'-phosphate
  modified_base 19: mod_base = OTHER; note = 2'-O-methyladenosine-3'-phosphate
  modified_base 20: mod_base = OTHER; note = 2'-O-methylcytidine-3'-phosphorothioate
  modified_base 21: mod_base = OTHER; note = 2'-O-methylguanosine-3'-phosphorothioate
  modified_base 22: mod_base = OTHER; note = 2'-O-methyladenosine-3'-phosphate
tattgagagaagtccaccacga

SEQ ID NO: 113 - RNA, 21 nt, synthetic construct
  source 1..21: mol_type = other RNA
  modified_base 1: mod_base = OTHER; note = vinyl phosphonate-2'-O-methyluridine-3'-phosphorothioate
  modified_base 2: mod_base = OTHER; note = 2'-fluoroadenosine-3'-phosporothioate
  modified_base 3: mod_base = OTHER; note = 2'-O-methyluridine-3'-phosphorothioate
  modified_base 4: mod_base = OTHER; note = 2'-fluorouridine-3'-phosphate
  modified_base 5: mod_base = OTHER; note = 2'-O-methylguanosine-3'-phosphate
  modified_base 6: mod_base = OTHER; note = 2'-fluoroadenosine-3'-phosphate
  modified_base 7: mod_base = OTHER; note = 2'-O-methylguanosine-3'-phosphate
  modified_base 8: mod_base = OTHER; note = 2'-O-methyladenosine-3'-phosphate
  modified_base 9: mod_base = OTHER; note = 2'-O-methylguanosine-3'-phosphate
  modified_base 10: mod_base = OTHER; note = 2'-O-methyladenosine-3'-phosphate
  modified_base 11: mod_base = OTHER; note = 2'-O-methyladenosine-3'-phosphate
  modified_base 12: mod_base = OTHER; note = 2'-fluoroguanosine-3'-phosphate
  modified_base 13: mod_base = OTHER; note = 2'-O-methyluridine-3'-phosphate
  modified_base 14: mod_base = OTHER; note = 2'-fluorocytidine-3'-phosphate
  modified_base 15: mod_base = OTHER; note = 2'-O-methylcytidine-3'-phosphate
  modified_base 16: mod_base = OTHER; note = 2'-fluoroadenosine-3'-phosphate
  modified_base 17: mod_base = OTHER; note = 2'-O-methylcytidine-3'-phosphate
  modified_base 18: mod_base = OTHER; note = 2'-fluorocytidine-3'-phosphate
  modified_base 19: mod_base = OTHER; note = 2'-O-methyladenosine-3'-phosphate
  modified_base 20: mod_base = OTHER; note = 2'-fluorocytidine-3'-phosphorothioate
  modified_base 21: mod_base = OTHER; note = 2'-O-methylguanosine-3'-phosphate
tattgagagaagtccaccacg

SEQ ID NO: 114 - RNA, 21 nt, synthetic construct
  source 1..21: mol_type = other RNA
  modified_base 1: mod_base = OTHER; note = 2'-O-methyluridine-3'-phosphorothioate
  modified_base 2: mod_base = OTHER; note = 2'-fluorouridine-3'-phosphorothioate
  modified_base 3: mod_base = OTHER; note = 2'-O-methyluridine-3'-phosphorothioate
  modified_base 4: mod_base = OTHER; note = 2'-fluoroguanosine-3'-phosphate
  modified_base 5: mod_base = OTHER; note = 2'-O-methyladenosine-3'-phosphate
  modified_base 6: mod_base = OTHER; note = 2'-fluoroguanosine-3'-phosphate
  modified_base 7: mod_base = OTHER; note = 2'-O-methyladenosine-3'-phosphate
  modified_base 8: mod_base = OTHER; note = 2'-O-methylguanosine-3'-phosphate
  modified_base 9: mod_base = OTHER; note = 2'-O-methyladenosine-3'-phosphate
  modified_base 10: mod_base = OTHER; note = 2'-O-methyladenosine-3'-phosphate
  modified_base 11: mod_base = OTHER; note = 2'-O-methylguanosine-3'-phosphate
  modified_base 12: mod_base = OTHER; note = 2'-fluorouridine-3'-phosphate
  modified_base 13: mod_base = OTHER; note = 2'-O-methylcytidine-3'-phosphate
  modified_base 14: mod_base = OTHER; note = 2'-fluorocytidine-3'-phosphate
  modified_base 15: mod_base = OTHER; note = 2'-O-methyladenosine-3'-phosphate
  modified_base 16: mod_base = OTHER; note = 2'-fluorocytidine-3'-phosphate
  modified_base 17: mod_base = OTHER; note = 2'-O-methylcytidine-3'-phosphate
  modified_base 18: mod_base = OTHER; note = 2'-fluoroadenosine-3'-phosphate
  modified_base 19: mod_base = OTHER; note = 2'-O-methylcytidine-3'-phosphate
  modified_base 20: mod_base = OTHER; note = 2'-O-methyluridine-3'-phosphorothioate
  modified_base 21: mod_base = OTHER; note = 2'-O-methyluridine-3'-phosphate
tttgagagaagtccaccactt

SEQ ID NO: 115 - RNA, 21 nt, synthetic construct
  source 1..21: mol_type = other RNA
  modified_base 1: mod_base = OTHER; note = 2'-O-methyluridine-3'-phosphorothioate
  modified_base 2: mod_base = OTHER; note = 2'-fluorouridine-3'-phosphorothioate
  modified_base 3: mod_base = OTHER; note = 2'-O-methyluridine-3'-phosphorothioate
  modified_base 4: mod_base = OTHER; note = 2'-fluoroguanosine-3'-phosphate
  modified_base 5: mod_base = OTHER; note = 2'-O-methyladenosine-3'-phosphate
  modified_base 6: mod_base = OTHER; note = 2'-fluoroguanosine-3'-phosphate
  modified_base 7: mod_base = OTHER; note = 2'-O-methyladenosine-3'-phosphate
  modified_base 8: mod_base = OTHER; note = 2'-O-methylguanosine-3'-phosphate
  modified_base 9: mod_base = OTHER; note = 2'-O-methyladenosine-3'-phosphate
  modified_base 10: mod_base = OTHER; note = 2'-O-methyladenosine-3'-phosphate
  modified_base 11: mod_base = OTHER; note = 2'-O-methylguanosine-3'-phosphate
  modified_base 12: mod_base = OTHER; note = 2'-fluorouridine-3'-phosphate
  modified_base 13: mod_base = OTHER; note = 2'-O-methylcytidine-3'-phosphate
  modified_base 14: mod_base = OTHER; note = 2'-fluorocytidine-3'-phosphate
  modified_base 15: mod_base = OTHER; note = 2'-O-methyladenosine-3'-phosphate
  modified_base 16: mod_base = OTHER; note = 2'-fluorocytidine-3'-phosphate
  modified_base 17: mod_base = OTHER; note = 2'-O-methylcytidine-3'-phosphate
  modified_base 18: mod_base = OTHER; note = 2'-fluoroadenosine-3'-phosphate
  modified_base 19: mod_base = OTHER; note = 2'-O-methylcytidine-3'-phosphate
  modified_base 20: mod_base = OTHER; note = 2'-O-methylguanosine-3'-phosphorothioate
  modified_base 21: mod_base = OTHER; note = 2'-O-methyladenosine-3'-phosphate
tttgagagaagtccaccacga

SEQ ID NO: 116 - RNA, 22 nt, synthetic construct
  source 1..22: mol_type = other RNA
  modified_base 1: mod_base = OTHER; note = 2'-O-methyluridine-3'-phosphorothioate
  modified_base 2: mod_base = OTHER; note = 2'-fluorouridine-3'-phosphorothioate
  modified_base 3: mod_base = OTHER; note = 2'-O-methyluridine-3'-phosphorothioate
  modified_base 4: mod_base = OTHER; note = 2'-fluoroguanosine-3'-phosphate
  modified_base 5: mod_base = OTHER; note = 2'-O-methyladenosine-3'-phosphate
  modified_base 6: mod_base = OTHER; note = 2'-fluoroguanosine-3'-phosphate
  modified_base 7: mod_base = OTHER; note = 2'-O-methyladenosine-3'-phosphate
  modified_base 8: mod_base = OTHER; note = 2'-O-methylguanosine-3'-phosphate
  modified_base 9: mod_base = OTHER; note = 2'-O-methyladenosine-3'-phosphate
  modified_base 10: mod_base = OTHER; note = 2'-O-methyladenosine-3'-phosphate
  modified_base 11: mod_base = OTHER; note = 2'-O-methylguanosine-3'-phosphate
  modified_base 12: mod_base = OTHER; note = 2'-fluorouridine-3'-phosphate
  modified_base 13: mod_base = OTHER; note = 2'-O-methylcytidine-3'-phosphate
  modified_base 14: mod_base = OTHER; note = 2'-fluorocytidine-3'-phosphate
  modified_base 15: mod_base = OTHER; note = 2'-O-methyladenosine-3'-phosphate
  modified_base 16: mod_base = OTHER; note = 2'-fluorocytidine-3'-phosphate
  modified_base 17: mod_base = OTHER; note = 2'-O-methylcytidine-3'-phosphate
  modified_base 18: mod_base = OTHER; note = 2'-fluoroadenosine-3'-phosphate
  modified_base 19: mod_base = OTHER; note = 2'-O-methylcytidine-3'-phosphate
  modified_base 20: mod_base = OTHER; note = 2'-O-methylguanosine-3'-phosphate
  modified_base 21: mod_base = OTHER; note = 2'-O-methyluridine-3'-phosphorothioate
  modified_base 22: mod_base = OTHER; note = 2'-O-methyluridine-3'-phosphate
tttgagagaagtccaccacgtt

SEQ ID NO: 117 - RNA, 22 nt, synthetic construct
  source 1..22: mol_type = other RNA
  modified_base 1: mod_base = OTHER; note = 2'-O-methyluridine-3'-phosphorothioate
  modified_base 2: mod_base = OTHER; note = 2'-fluorouridine-3'-phosphorothioate
  modified_base 3: mod_base = OTHER; note = 2'-O-methyluridine-3'-phosphorothioate
  modified_base 4: mod_base = OTHER; note = 2'-fluoroguanosine-3'-phosphate
  modified_base 5: mod_base = OTHER; note = 2'-O-methyladenosine-3'-phosphate
  modified_base 6: mod_base = OTHER; note = 2'-fluoroguanosine-3'-phosphate
  modified_base 7: mod_base = OTHER; note = 2'-O-methyladenosine-3'-phosphate
  modified_base 8: mod_base = OTHER; note = 2'-O-methylguanosine-3'-phosphate
  modified_base 9: mod_base = OTHER; note = 2'-O-methyladenosine-3'-phosphate
  modified_base 10: mod_base = OTHER; note = 2'-O-methyladenosine-3'-phosphate
  modified_base 11: mod_base = OTHER; note = 2'-O-methylguanosine-3'-phosphate
  modified_base 12: mod_base = OTHER; note = 2'-fluorouridine-3'-phosphate
  modified_base 13: mod_base = OTHER; note = 2'-O-methylcytidine-3'-phosphate
  modified_base 14: mod_base = OTHER; note = 2'-fluorocytidine-3'-phosphate
  modified_base 15: mod_base = OTHER; note = 2'-O-methyladenosine-3'-phosphate
  modified_base 16: mod_base = OTHER; note = 2'-fluorocytidine-3'-phosphate
  modified_base 17: mod_base = OTHER; note = 2'-O-methylcytidine-3'-phosphate
  modified_base 18: mod_base = OTHER; note = 2'-fluoroadenosine-3'-phosphate
  modified_base 19: mod_base = OTHER; note = 2'-O-methylcytidine-3'-phosphate
  modified_base 20: mod_base = OTHER; note = 2'-O-methylguanosine-3'-phosphate
  modified_base 21: mod_base = OTHER; note = 2'-O-methyladenosine-3'-phosphorothioate
  modified_base 22: mod_base = OTHER; note = 2'-O-methylguanosine-3'-phosphate
tttgagagaagtccaccacgag

SEQ ID NO: 118 - RNA, 21 nt, synthetic construct
  source 1..21: mol_type = other RNA
  modified_base 1: mod_base = OTHER; note = cyclopropyl phosphonate-2'-O-methyluridine-3'-phosphorothioate
  modified_base 2: mod_base = OTHER; note = 2'-fluorouridine-3'-phosphorothioate
  modified_base 3: mod_base = OTHER; note = 2'-O-methyluridine-3'-phosphorothioate
  modified_base 4: mod_base = OTHER; note = 2'-fluoroguanosine-3'-phosphate
  modified_base 5: mod_base = OTHER; note = 2'-O-methyladenosine-3'-phosphate
  modified_base 6: mod_base = OTHER; note = 2'-fluoroguanosine-3'-phosphate
  modified_base 7: mod_base = OTHER; note = 2'-O-methyladenosine-3'-phosphate
  modified_base 8: mod_base = OTHER; note = 2'-fluoroguanosine-3'-phosphate
  modified_base 9: mod_base = OTHER; note = 2'-O-methyladenosine-3'-phosphate
  modified_base 10: mod_base = OTHER; note = 2'-fluoroadenosine-3'-phosphate
  modified_base 11: mod_base = OTHER; note = 2'-O-methylguanosine-3'-phosphate
  modified_base 12: mod_base = OTHER; note = 2'-fluorouridine-3'-phosphate
  modified_base 13: mod_base = OTHER; note = 2'-O-methylcytidine-3'-phosphate
  modified_base 14: mod_base = OTHER; note = 2'-fluorocytidine-3'-phosphate
  modified_base 15: mod_base = OTHER; note = 2'-O-methyladenosine-3'-phosphate
  modified_base 16: mod_base = OTHER; note = 2'-fluorocytidine-3'-phosphate
  modified_base 17: mod_base = OTHER; note = 2'-O-methylcytidine-3'-phosphate
  modified_base 18: mod_base = OTHER; note = 2'-fluoroadenosine-3'-phosphate
  modified_base 19: mod_base = OTHER; note = 2'-O-methylcytidine-3'-phosphate
  modified_base 20: mod_base = OTHER; note = 2'-O-methyluridine-3'-phosphorothioate
  modified_base 21: mod_base = OTHER; note = 2'-O-methyluridine-3'-phosphate
tttgagagaagtccaccactt

SEQ ID NO: 119 - RNA, 22 nt, synthetic construct
  source 1..22: mol_type = other RNA
  modified_base 1: mod_base = OTHER; note = cyclopropyl phosphonate-2'-O-methyluridine-3'-phosphorothioate
  modified_base 2: mod_base = OTHER; note = 2'-fluoroadenosine-3'-phosporothioate
  modified_base 3: mod_base = OTHER; note = 2'-O-methyluridine-3'-phosphorothioate
  modified_base 4: mod_base = OTHER; note = 2'-fluorouridine-3'-phosphate
  modified_base 5: mod_base = OTHER; note = 2'-O-methylguanosine-3'-phosphate
  modified_base 6: mod_base = OTHER; note = 2'-fluoroadenosine-3'-phosphate
  modified_base 7: mod_base = OTHER; note = 2'-O-methylguanosine-3'-phosphate
  modified_base 8: mod_base = OTHER; note = 2'-O-methyladenosine-3'-phosphate
  modified_base 9: mod_base = OTHER; note = 2'-O-methylguanosine-3'-phosphate
  modified_base 10: mod_base = OTHER; note = 2'-O-methyladenosine-3'-phosphate
  modified_base 11: mod_base = OTHER; note = 2'-O-methyladenosine-3'-phosphate
  modified_base 12: mod_base = OTHER; note = 2'-fluoroguanosine-3'-phosphate
  modified_base 13: mod_base = OTHER; note = 2'-O-methyluridine-3'-phosphate
  modified_base 14: mod_base = OTHER; note = 2'-fluorocytidine-3'-phosphate
  modified_base 15: mod_base = OTHER; note = 2'-O-methylcytidine-3'-phosphate
  modified_base 16: mod_base = OTHER; note = 2'-fluoroadenosine-3'-phosphate
  modified_base 17: mod_base = OTHER; note = 2'-O-methylcytidine-3'-phosphate
  modified_base 18: mod_base = OTHER; note = 2'-fluorocytidine-3'-phosphate
  modified_base 19: mod_base = OTHER; note = 2'-O-methyladenosine-3'-phosphate
  modified_base 20: mod_base = OTHER; note = 2'-O-methylcytidine-3'-phosphorothioate
  modified_base 21: mod_base = OTHER; note = 2'-O-methyluridine-3'-phosphorothioate
  modified_base 22: mod_base = OTHER; note = 2'-O-methyluridine-3'-phosphate
tattgagagaagtccaccactt

SEQ ID NO: 120 - RNA, 22 nt, synthetic construct
  source 1..22: mol_type = other RNA
  modified_base 1: mod_base = OTHER; note = 2'-O-methyluridine-3'-phosphorothioate
  modified_base 2: mod_base = OTHER; note = 2'-fluoroadenosine-3'-phosporothioate
  modified_base 3: mod_base = OTHER; note = 2'-O-methyluridine-3'-phosphorothioate
  modified_base 4: mod_base = OTHER; note = 2'-fluorouridine-3'-phosphate
  modified_base 5: mod_base = OTHER; note = 2'-O-methylguanosine-3'-phosphate
  modified_base 6: mod_base = OTHER; note = 2'-fluoroadenosine-3'-phosphate
  modified_base 7: mod_base = OTHER; note = 2'-O-methylguanosine-3'-phosphate
  modified_base 8: mod_base = OTHER; note = 2'-O-methyladenosine-3'-phosphate
  modified_base 9: mod_base = OTHER; note = 2'-O-methylguanosine-3'-phosphate
  modified_base 10: mod_base = OTHER; note = 2'-O-methyladenosine-3'-phosphate
  modified_base 11: mod_base = OTHER; note = 2'-O-methyladenosine-3'-phosphate
  modified_base 12: mod_base = OTHER; note = 2'-fluoroguanosine-3'-phosphate
  modified_base 13: mod_base = OTHER; note = 2'-O-methyluridine-3'-phosphate
  modified_base 14: mod_base = OTHER; note = 2'-fluorocytidine-3'-phosphate
  modified_base 15: mod_base = OTHER; note = 2'-O-methylcytidine-3'-phosphate
  modified_base 16: mod_base = OTHER; note = 2'-fluoroadenosine-3'-phosphate
  modified_base 17: mod_base = OTHER; note = 2'-O-methylcytidine-3'-phosphate
  modified_base 18: mod_base = OTHER; note = 2'-fluorocytidine-3'-phosphate
  modified_base 19: mod_base = OTHER; note = 2'-O-methyladenosine-3'-phosphate
  modified_base 20: mod_base = OTHER; note = 2'-O-methylcytidine-3'-phosphate
  modified_base 21: mod_base = OTHER; note = 2'-O-methyluridine-3'-phosphorothioate
  modified_base 22: mod_base = OTHER; note = 2'-O-methyluridine-3'-phosphate
tattgagagaagtccaccactt

SEQ ID NO: 121 - RNA, 23 nt, synthetic construct
  source 1..23: mol_type = other RNA
  modified_base 1: mod_base = OTHER; note = 2'-O-methyluridine-3'-phosphorothioate
  modified_base 2: mod_base = OTHER; note = 2'-fluoroadenosine-3'-phosporothioate
  modified_base 3: mod_base = OTHER; note = 2'-O-methyluridine-3'-phosphorothioate
  modified_base 4: mod_base = OTHER; note = 2'-fluorouridine-3'-phosphate
  modified_base 5: mod_base = OTHER; note = 2'-O-methylguanosine-3'-phosphate
  modified_base 6: mod_base = OTHER; note = 2'-fluoroadenosine-3'-phosphate
  modified_base 7: mod_base = OTHER; note = 2'-O-methylguanosine-3'-phosphate
  modified_base 8: mod_base = OTHER; note = 2'-O-methyladenosine-3'-phosphate
  modified_base 9: mod_base = OTHER; note = 2'-O-methylguanosine-3'-phosphate
  modified_base 10: mod_base = OTHER; note = 2'-O-methyladenosine-3'-phosphate
  modified_base 11: mod_base = OTHER; note = 2'-O-methyladenosine-3'-phosphate
  modified_base 12: mod_base = OTHER; note = 2'-fluoroguanosine-3'-phosphate
  modified_base 13: mod_base = OTHER; note = 2'-O-methyluridine-3'-phosphate
  modified_base 14: mod_base = OTHER; note = 2'-fluorocytidine-3'-phosphate
  modified_base 15: mod_base = OTHER; note = 2'-O-methylcytidine-3'-phosphate
  modified_base 16: mod_base = OTHER; note = 2'-fluoroadenosine-3'-phosphate
  modified_base 17: mod_base = OTHER; note = 2'-O-methylcytidine-3'-phosphate
  modified_base 18: mod_base = OTHER; note = 2'-fluorocytidine-3'-phosphate
  modified_base 19: mod_base = OTHER; note = 2'-O-methyladenosine-3'-phosphate
  modified_base 20: mod_base = OTHER; note = 2'-O-methylcytidine-3'-phosphate
  modified_base 21: mod_base = OTHER; note = 2'-O-methylguanosine-3'-phosphate
  modified_base 22: mod_base = OTHER; note = 2'-O-methyluridine-3'-phosphorothioate
  modified_base 23: mod_base = OTHER; note = 2'-O-methyluridine-3'-phosphate
tattgagagaagtccaccacgtt

SEQ ID NO: 122 - DNA, 23 bp, synthetic construct
  source 1..23: mol_type = other DNA
  modified_base 1: mod_base = OTHER; note = 2'-O-methyluridine-3'-phosphorothioate
  modified_base 2: mod_base = OTHER; note = 2'-fluoroadenosine-3'-phosporothioate
  modified_base 3: mod_base = OTHER; note = 2'-O-methyluridine-3'-phosphorothioate
  modified_base 4: mod_base = OTHER; note = 2'-fluorouridine-3'-phosphate
  modified_base 5: mod_base = OTHER; note = 2'-O-methylguanosine-3'-phosphate
  modified_base 6: mod_base = OTHER; note = 2'-fluoroadenosine-3'-phosphate
  modified_base 7: mod_base = OTHER; note = 2'-O-methylguanosine-3'-phosphate
  modified_base 8: mod_base = OTHER; note = 2'-O-methyladenosine-3'-phosphate
  modified_base 9: mod_base = OTHER; note = 2'-O-methylguanosine-3'-phosphate
  modified_base 10: mod_base = OTHER; note = 2'-O-methyladenosine-3'-phosphate
  modified_base 11: mod_base = OTHER; note = 2'-O-methyladenosine-3'-phosphate
  modified_base 12: mod_base = OTHER; note = 2'-fluoroguanosine-3'-phosphate
  modified_base 13: mod_base = OTHER; note = 2'-O-methyluridine-3'-phosphate
  modified_base 14: mod_base = OTHER; note = 2'-fluorocytidine-3'-phosphate
  modified_base 15: mod_base = OTHER; note = 2'-O-methylcytidine-3'-phosphate
  modified_base 16: mod_base = OTHER; note = 2'-fluoroadenosine-3'-phosphate
  modified_base 17: mod_base = OTHER; note = 2'-O-methylcytidine-3'-phosphate
  modified_base 18: mod_base = OTHER; note = 2'-fluorocytidine-3'-phosphate
  modified_base 19: mod_base = OTHER; note = 2'-O-methyladenosine-3'-phosphate
  modified_base 20: mod_base = OTHER; note = 2'-O-methylcytidine-3'-phosphate
  modified_base 21: mod_base = OTHER; note = 2'-O-methyluridine-3'-phosphate
  modified_base 22: mod_base = OTHER; note = 2'-O-methyluridine-3'-phosphorothioate
  modified_base 23: mod_base = OTHER; note = inverted (3'-3' linked) abasic deoxyribonucleotide
  misc_feature 1..22: note = RNA
  misc_feature 23: note = DNA
tattgagagaagtccaccacttn

SEQ ID NO: 123 - RNA, 23 nt, synthetic construct
  source 1..23: mol_type = other RNA
  modified_base 1: mod_base = OTHER; note = 2'-O-methyluridine-3'-phosphorothioate
  modified_base 2: mod_base = OTHER; note = 2'-fluoroadenosine-3'-phosporothioate
  modified_base 3: mod_base = OTHER; note = 2'-O-methyluridine-3'-phosphorothioate
  modified_base 4: mod_base = OTHER; note = 2'-fluorouridine-3'-phosphate
  modified_base 5: mod_base = OTHER; note = 2'-O-methylguanosine-3'-phosphate
  modified_base 6: mod_base = OTHER; note = 2'-fluoroadenosine-3'-phosphate
  modified_base 7: mod_base = OTHER; note = 2'-O-methylguanosine-3'-phosphate
  modified_base 8: mod_base = OTHER; note = 2'-O-methyladenosine-3'-phosphate
  modified_base 9: mod_base = OTHER; note = 2'-O-methylguanosine-3'-phosphate
  modified_base 10: mod_base = OTHER; note = 2'-O-methyladenosine-3'-phosphate
  modified_base 11: mod_base = OTHER; note = 2'-O-methyladenosine-3'-phosphate
  modified_base 12: mod_base = OTHER; note = 2'-fluoroguanosine-3'-phosphate
  modified_base 13: mod_base = OTHER; note = 2'-O-methyluridine-3'-phosphate
  modified_base 14: mod_base = OTHER; note = 2'-fluorocytidine-3'-phosphate
  modified_base 15: mod_base = OTHER; note = 2'-O-methylcytidine-3'-phosphate
  modified_base 16: mod_base = OTHER; note = 2'-fluoroadenosine-3'-phosphate
  modified_base 17: mod_base = OTHER; note = 2'-O-methylcytidine-3'-phosphate
  modified_base 18: mod_base = OTHER; note = 2'-fluorocytidine-3'-phosphate
  modified_base 19: mod_base = OTHER; note = 2'-O-methyladenosine-3'-phosphate
  modified_base 20: mod_base = OTHER; note = 2'-O-methylcytidine-3'-phosphate
  modified_base 21: mod_base = OTHER; note = 2'-O-methylguanosine-3'-phosphate
  modified_base 22: mod_base = OTHER; note = 2'-O-methyladenosine-3'-phosphorothioate
  modified_base 23: mod_base = OTHER; note = 2'-O-methylguanosine-3'-phosphate
tattgagagaagtccaccacgag

SEQ ID NO: 124 - RNA, 22 nt, synthetic construct
  source 1..22: mol_type = other RNA
  modified_base 1: mod_base = OTHER; note = 2'-O-methyluridine-3'-phosphorothioate
  modified_base 2: mod_base = OTHER; note = 2'-fluoroadenosine-3'-phosporothioate
  modified_base 3: mod_base = OTHER; note = 2'-O-methyluridine-3'-phosphorothioate
  modified_base 4: mod_base = OTHER; note = 2'-fluorouridine-3'-phosphate
  modified_base 5: mod_base = OTHER; note = 2'-O-methylguanosine-3'-phosphate
  modified_base 6: mod_base = OTHER; note = 2'-fluoroadenosine-3'-phosphate
  modified_base 7: mod_base = OTHER; note = 2'-O-methylguanosine-3'-phosphate
  modified_base 8: mod_base = OTHER; note = 2'-fluoroadenosine-3'-phosphate
  modified_base 9: mod_base = OTHER; note = 2'-O-methylguanosine-3'-phosphate
  modified_base 10: mod_base = OTHER; note = 2'-fluoroadenosine-3'-phosphate
  modified_base 11: mod_base = OTHER; note = 2'-O-methyladenosine-3'-phosphate
  modified_base 12: mod_base = OTHER; note = 2'-fluoroguanosine-3'-phosphate
  modified_base 13: mod_base = OTHER; note = 2'-O-methyluridine-3'-phosphate
  modified_base 14: mod_base = OTHER; note = 2'-fluorocytidine-3'-phosphate
  modified_base 15: mod_base = OTHER; note = 2'-O-methylcytidine-3'-phosphate
  modified_base 16: mod_base = OTHER; note = 2'-fluoroadenosine-3'-phosphate
  modified_base 17: mod_base = OTHER; note = 2'-O-methylcytidine-3'-phosphate
  modified_base 18: mod_base = OTHER; note = 2'-fluorocytidine-3'-phosphate
  modified_base 19: mod_base = OTHER; note = 2'-O-methyladenosine-3'-phosphate
  modified_base 20: mod_base = OTHER; note = 2'-O-methylcytidine-3'-phosphate
  modified_base 21: mod_base = OTHER; note = 2'-O-methyluridine-3'-phosphorothioate
  modified_base 22: mod_base = OTHER; note = 2'-O-methyluridine-3'-phosphate
tattgagagaagtccaccactt

SEQ ID NO: 125 - RNA, 21 nt, synthetic construct
  source 1..21: mol_type = other RNA
  modified_base 1: mod_base = OTHER; note = 2'-O-methyladenosine-3'-phosphorothioate
  modified_base 2: mod_base = OTHER; note = 2'-fluoroguanosine-3'-phosphorothioate
  modified_base 3: mod_base = OTHER; note = 2'-O-methyladenosine-3'-phosphorothioate
  modified_base 4: mod_base = OTHER; note = 2'-fluoroadenosine-3'-phosphate
  modified_base 5: mod_base = OTHER; note = 2'-O-methyladenosine-3'-phosphate
  modified_base 6: mod_base = OTHER; note = 2'-fluoroadenosine-3'-phosphate
  modified_base 7: mod_base = OTHER; note = 2'-O-methyluridine-3'-phosphate
  modified_base 8: mod_base = OTHER; note = 2'-fluorouridine-3'-phosphate
  modified_base 9: mod_base = OTHER; note = 2'-O-methylguanosine-3'-phosphate
  modified_base 10: mod_base = OTHER; note = 2'-fluoroadenosine-3'-phosphate
  modified_base 11: mod_base = OTHER; note = 2'-O-methylguanosine-3'-phosphate
  modified_base 12: mod_base = OTHER; note = 2'-fluoroadenosine-3'-phosphate
  modified_base 13: mod_base = OTHER; note = 2'-O-methylguanosine-3'-phosphate
  modified_base 14: mod_base = OTHER; note = 2'-fluoroadenosine-3'-phosphate
  modified_base 15: mod_base = OTHER; note = 2'-O-methyladenosine-3'-phosphate
  modified_base 16: mod_base = OTHER; note = 2'-fluoroguanosine-3'-phosphate
  modified_base 17: mod_base = OTHER; note = 2'-O-methyluridine-3'-phosphate
  modified_base 18: mod_base = OTHER; note = 2'-fluorocytidine-3'-phosphate
  modified_base 19: mod_base = OTHER; note = 2'-O-methylcytidine-3'-phosphate
  modified_base 20: mod_base = OTHER; note = 2'-O-methyluridine-3'-phosphorothioate
  modified_base 21: mod_base = OTHER; note = 2'-O-methyluridine-3'-phosphate
agaaaattgagagaagtcctt

SEQ ID NO: 126 - RNA, 21 nt, synthetic construct
  source 1..21: mol_type = other RNA
  modified_base 1: mod_base = OTHER; note = 2'-O-methyladenosine-3'-phosphorothioate
  modified_base 2: mod_base = OTHER; note = 2'-fluoroguanosine-3'-phosphorothioate
  modified_base 3: mod_base = OTHER; note = 2'-O-methyladenosine-3'-phosphorothioate
  modified_base 4: mod_base = OTHER; note = 2'-fluoroadenosine-3'-phosphate
  modified_base 5: mod_base = OTHER; note = 2'-O-methyladenosine-3'-phosphate
  modified_base 6: mod_base = OTHER; note = 2'-fluoroadenosine-3'-phosphate
  modified_base 7: mod_base = OTHER; note = 2'-O-methyluridine-3'-phosphate
  modified_base 8: mod_base = OTHER; note = 2'-fluorouridine-3'-phosphate
  modified_base 9: mod_base = OTHER; note = 2'-O-methylguanosine-3'-phosphate
  modified_base 10: mod_base = OTHER; note = 2'-fluoroadenosine-3'-phosphate
  modified_base 11: mod_base = OTHER; note = 2'-O-methylguanosine-3'-phosphate
  modified_base 12: mod_base = OTHER; note = 2'-fluoroadenosine-3'-phosphate
  modified_base 13: mod_base = OTHER; note = 2'-O-methylguanosine-3'-phosphate
  modified_base 14: mod_base = OTHER; note = 2'-fluoroadenosine-3'-phosphate
  modified_base 15: mod_base = OTHER; note = 2'-O-methyladenosine-3'-phosphate
  modified_base 16: mod_base = OTHER; note = 2'-fluoroguanosine-3'-phosphate
  modified_base 17: mod_base = OTHER; note = 2'-O-methyluridine-3'-phosphate
  modified_base 18: mod_base = OTHER; note = 2'-fluorocytidine-3'-phosphate
  modified_base 19: mod_base = OTHER; note = 2'-O-methylcytidine-3'-phosphate
  modified_base 20: mod_base = OTHER; note = 2'-O-methyladenosine-3'-phosphorothioate
  modified_base 21: mod_base = OTHER; note = 2'-O-methylcytidine-3'-phosphate
agaaaattgagagaagtccac

SEQ ID NO: 127 - RNA, 23 nt, synthetic construct
  source 1..23: mol_type = other RNA
  modified_base 1: mod_base = OTHER; note = 2'-O-methyladenosine-3'-phosphorothioate
  modified_base 2: mod_base = OTHER; note = 2'-fluoroguanosine-3'-phosphorothioate
  modified_base 3: mod_base = OTHER; note = 2'-O-methyladenosine-3'-phosphorothioate
  modified_base 4: mod_base = OTHER; note = 2'-fluoroadenosine-3'-phosphate
  modified_base 5: mod_base = OTHER; note = 2'-O-methyladenosine-3'-phosphate
  modified_base 6: mod_base = OTHER; note = 2'-fluoroadenosine-3'-phosphate
  modified_base 7: mod_base = OTHER; note = 2'-O-methyluridine-3'-phosphate
  modified_base 8: mod_base = OTHER; note = 2'-fluorouridine-3'-phosphate
  modified_base 9: mod_base = OTHER; note = 2'-O-methylguanosine-3'-phosphate
  modified_base 10: mod_base = OTHER; note = 2'-fluoroadenosine-3'-phosphate
  modified_base 11: mod_base = OTHER; note = 2'-O-methylguanosine-3'-phosphate
  modified_base 12: mod_base = OTHER; note = 2'-fluoroadenosine-3'-phosphate
  modified_base 13: mod_base = OTHER; note = 2'-O-methylguanosine-3'-phosphate
  modified_base 14: mod_base = OTHER; note = 2'-fluoroadenosine-3'-phosphate
  modified_base 15: mod_base = OTHER; note = 2'-O-methyladenosine-3'-phosphate
  modified_base 16: mod_base = OTHER; note = 2'-fluoroguanosine-3'-phosphate
  modified_base 17: mod_base = OTHER; note = 2'-O-methyluridine-3'-phosphate
  modified_base 18: mod_base = OTHER; note = 2'-fluorocytidine-3'-phosphate
  modified_base 19: mod_base = OTHER; note = 2'-O-methylcytidine-3'-phosphate
  modified_base 20: mod_base = OTHER; note = 2'-O-methyladenosine-3'-phosphate
  modified_base 21: mod_base = OTHER; note = 2'-O-methylcytidine-3'-phosphate
  modified_base 22: mod_base = OTHER; note = 2'-O-methyluridine-3'-phosphorothioate
  modified_base 23: mod_base = OTHER; note = 2'-O-methyluridine-3'-phosphate
agaaaattgagagaagtccactt

SEQ ID NO: 128 - RNA, 22 nt, synthetic construct
  source 1..22: mol_type = other RNA
  modified_base 1: mod_base = OTHER; note = 2'-O-methyladenosine-3'-phosphorothioate
  modified_base 2: mod_base = OTHER; note = 2'-fluoroguanosine-3'-phosphorothioate
  modified_base 3: mod_base = OTHER; note = 2'-O-methyladenosine-3'-phosphorothioate
  modified_base 4: mod_base = OTHER; note = 2'-fluoroadenosine-3'-phosphate
  modified_base 5: mod_base = OTHER; note = 2'-O-methyladenosine-3'-phosphate
  modified_base 6: mod_base = OTHER; note = 2'-fluoroadenosine-3'-phosphate
  modified_base 7: mod_base = OTHER; note = 2'-O-methyluridine-3'-phosphate
  modified_base 8: mod_base = OTHER; note = 2'-fluorouridine-3'-phosphate
  modified_base 9: mod_base = OTHER; note = 2'-O-methylguanosine-3'-phosphate
  modified_base 10: mod_base = OTHER; note = 2'-fluoroadenosine-3'-phosphate
  modified_base 11: mod_base = OTHER; note = 2'-O-methylguanosine-3'-phosphate
  modified_base 12: mod_base = OTHER; note = 2'-fluoroadenosine-3'-phosphate
  modified_base 13: mod_base = OTHER; note = 2'-O-methylguanosine-3'-phosphate
  modified_base 14: mod_base = OTHER; note = 2'-fluoroadenosine-3'-phosphate
  modified_base 15: mod_base = OTHER; note = 2'-O-methyladenosine-3'-phosphate
  modified_base 16: mod_base = OTHER; note = 2'-fluoroguanosine-3'-phosphate
  modified_base 17: mod_base = OTHER; note = 2'-O-methyluridine-3'-phosphate
  modified_base 18: mod_base = OTHER; note = 2'-fluorocytidine-3'-phosphate
  modified_base 19: mod_base = OTHER; note = 2'-O-methylcytidine-3'-phosphate
  modified_base 20: mod_base = OTHER; note = 2'-O-methyladenosine-3'-phosphate
  modified_base 21: mod_base = OTHER; note = 2'-O-methylcytidine-3'-phosphorothioate
  modified_base 22: mod_base = OTHER; note = 2'-O-methylcytidine-3'-phosphate
agaaaattgagagaagtccacc

SEQ ID NO: 129 - RNA, 21 nt, synthetic construct
  source 1..21: mol_type = other RNA
  modified_base 1: mod_base = OTHER; note = 2'-O-methyluridine-3'-phosphorothioate
  modified_base 2: mod_base = OTHER; note = 2'-fluoroguanosine-3'-phosphorothioate
  modified_base 3: mod_base = OTHER; note = 2'-O-methyladenosine-3'-phosphorothioate
  modified_base 4: mod_base = OTHER; note = 2'-fluoroadenosine-3'-phosphate
  modified_base 5: mod_base = OTHER; note = 2'-O-methyladenosine-3'-phosphate
  modified_base 6: mod_base = OTHER; note = 2'-fluoroadenosine-3'-phosphate
  modified_base 7: mod_base = OTHER; note = 2'-O-methyluridine-3'-phosphate
  modified_base 8: mod_base = OTHER; note = 2'-fluorouridine-3'-phosphate
  modified_base 9: mod_base = OTHER; note = 2'-O-methylguanosine-3'-phosphate
  modified_base 10: mod_base = OTHER; note = 2'-fluoroadenosine-3'-phosphate
  modified_base 11: mod_base = OTHER; note = 2'-O-methylguanosine-3'-phosphate
  modified_base 12: mod_base = OTHER; note = 2'-fluoroadenosine-3'-phosphate
  modified_base 13: mod_base = OTHER; note = 2'-O-methylguanosine-3'-phosphate
  modified_base 14: mod_base = OTHER; note = 2'-fluoroadenosine-3'-phosphate
  modified_base 15: mod_base = OTHER; note = 2'-O-methyladenosine-3'-phosphate
  modified_base 16: mod_base = OTHER; note = 2'-fluoroguanosine-3'-phosphate
  modified_base 17: mod_base = OTHER; note = 2'-O-methyluridine-3'-phosphate
  modified_base 18: mod_base = OTHER; note = 2'-fluorocytidine-3'-phosphate
  modified_base 19: mod_base = OTHER; note = 2'-O-methylcytidine-3'-phosphate
  modified_base 20: mod_base = OTHER; note = 2'-O-methyluridine-3'-phosphorothioate
  modified_base 21: mod_base = OTHER; note = 2'-O-methyluridine-3'-phosphate
tgaaaattgagagaagtcctt

SEQ ID NO: 130 - RNA, 21 nt, synthetic construct
  source 1..21: mol_type = other RNA
  modified_base 1: mod_base = OTHER; note = 2'-O-methyluridine-3'-phosphorothioate
  modified_base 2: mod_base = OTHER; note = 2'-fluoroguanosine-3'-phosphorothioate
  modified_base 3: mod_base = OTHER; note = 2'-O-methyladenosine-3'-phosphorothioate
  modified_base 4: mod_base = OTHER; note = 2'-fluoroadenosine-3'-phosphate
  modified_base 5: mod_base = OTHER; note = 2'-O-methyladenosine-3'-phosphate
  modified_base 6: mod_base = OTHER; note = 2'-fluoroadenosine-3'-phosphate
  modified_base 7: mod_base = OTHER; note = 2'-O-methyluridine-3'-phosphate
  modified_base 8: mod_base = OTHER; note = 2'-fluorouridine-3'-phosphate
  modified_base 9: mod_base = OTHER; note = 2'-O-methylguanosine-3'-phosphate
  modified_base 10: mod_base = OTHER; note = 2'-fluoroadenosine-3'-phosphate
  modified_base 11: mod_base = OTHER; note = 2'-O-methylguanosine-3'-phosphate
  modified_base 12: mod_base = OTHER; note = 2'-fluoroadenosine-3'-phosphate
  modified_base 13: mod_base = OTHER; note = 2'-O-methylguanosine-3'-phosphate
  modified_base 14: mod_base = OTHER; note = 2'-fluoroadenosine-3'-phosphate
  modified_base 15: mod_base = OTHER; note = 2'-O-methyladenosine-3'-phosphate
  modified_base 16: mod_base = OTHER; note = 2'-fluoroguanosine-3'-phosphate
  modified_base 17: mod_base = OTHER; note = 2'-O-methyluridine-3'-phosphate
  modified_base 18: mod_base = OTHER; note = 2'-fluorocytidine-3'-phosphate
  modified_base 19: mod_base = OTHER; note = 2'-O-methylcytidine-3'-phosphate
  modified_base 20: mod_base = OTHER; note = 2'-O-methyladenosine-3'-phosphorothioate
  modified_base 21: mod_base = OTHER; note = 2'-O-methylcytidine-3'-phosphate
tgaaaattgagagaagtccac

SEQ ID NO: 131 - RNA, 21 nt, synthetic construct
  source 1..21: mol_type = other RNA
  modified_base 1: mod_base = OTHER; note = 2'-O-methyladenosine-3'-phosphorothioate
  modified_base 2: mod_base = OTHER; note = 2'-fluorocytidine-3'-phosphorothioate
  modified_base 3: mod_base = OTHER; note = 2'-O-methylcytidine-3'-phosphorothioate
  modified_base 4: mod_base = OTHER; note = 2'-fluoroadenosine-3'-phosphate
  modified_base 5: mod_base = OTHER; note = 2'-O-methyladenosine-3'-phosphate
  modified_base 6: mod_base = OTHER; note = 2'-fluorouridine-3'-phosphate
  modified_base 7: mod_base = OTHER; note = 2'-O-methyluridine-3'-phosphate
  modified_base 8: mod_base = OTHER; note = 2'-fluorouridine-3'-phosphate
  modified_base 9: mod_base = OTHER; note = 2'-O-methyladenosine-3'-phosphate
  modified_base 10: mod_base = OTHER; note = 2'-fluorouridine-3'-phosphate
  modified_base 11: mod_base = OTHER; note = 2'-O-methylguanosine-3'-phosphate
  modified_base 12: mod_base = OTHER; note = 2'-fluorocytidine-3'-phosphate
  modified_base 13: mod_base = OTHER; note = 2'-O-methylcytidine-3'-phosphate
  modified_base 14: mod_base = OTHER; note = 2'-fluorouridine-3'-phosphate
  modified_base 15: mod_base = OTHER; note = 2'-O-methyladenosine-3'-phosphate
  modified_base 16: mod_base = OTHER; note = 2'-fluorocytidine-3'-phosphate
  modified_base 17: mod_base = OTHER; note = 2'-O-methyladenosine-3'-phosphate
  modified_base 18: mod_base = OTHER; note = 2'-fluoroguanosine-3'-phosphate
  modified_base 19: mod_base = OTHER; note = 2'-O-methylcytidine-3'-phosphate
  modified_base 20: mod_base = OTHER; note = 2'-O-methyluridine-3'-phosphorothioate
  modified_base 21: mod_base = OTHER; note = 2'-O-methyluridine-3'-phosphate
accaatttatgcctacagctt

SEQ ID NO: 132 - RNA, 22 nt, synthetic construct
  source 1..22: mol_type = other RNA
  modified_base 1: mod_base = OTHER; note = 2'-O-methyladenosine-3'-phosphorothioate
  modified_base 2: mod_base = OTHER; note = 2'-fluorocytidine-3'-phosphorothioate
  modified_base 3: mod_base = OTHER; note = 2'-O-methylcytidine-3'-phosphorothioate
  modified_base 4: mod_base = OTHER; note = 2'-fluoroadenosine-3'-phosphate
  modified_base 5: mod_base = OTHER; note = 2'-O-methyladenosine-3'-phosphate
  modified_base 6: mod_base = OTHER; note = 2'-fluorouridine-3'-phosphate
  modified_base 7: mod_base = OTHER; note = 2'-O-methyluridine-3'-phosphate
  modified_base 8: mod_base = OTHER; note = 2'-fluorouridine-3'-phosphate
  modified_base 9: mod_base = OTHER; note = 2'-O-methyladenosine-3'-phosphate
  modified_base 10: mod_base = OTHER; note = 2'-fluorouridine-3'-phosphate
  modified_base 11: mod_base = OTHER; note = 2'-O-methylguanosine-3'-phosphate
  modified_base 12: mod_base = OTHER; note = 2'-fluorocytidine-3'-phosphate
  modified_base 13: mod_base = OTHER; note = 2'-O-methylcytidine-3'-phosphate
  modified_base 14: mod_base = OTHER; note = 2'-fluorouridine-3'-phosphate
  modified_base 15: mod_base = OTHER; note = 2'-O-methyladenosine-3'-phosphate
  modified_base 16: mod_base = OTHER; note = 2'-fluorocytidine-3'-phosphate
  modified_base 17: mod_base = OTHER; note = 2'-O-methyladenosine-3'-phosphate
  modified_base 18: mod_base = OTHER; note = 2'-fluoroguanosine-3'-phosphate
  modified_base 19: mod_base = OTHER; note = 2'-O-methylcytidine-3'-phosphate
  modified_base 20: mod_base = OTHER; note = 2'-O-methylcytidine-3'-phosphate
  modified_base 21: mod_base = OTHER; note = 2'-O-methyluridine-3'-phosphorothioate
  modified_base 22: mod_base = OTHER; note = 2'-O-methyluridine-3'-phosphate
accaatttatgcctacagcctt

SEQ ID NO: 133 - RNA, 22 nt, synthetic construct
  source 1..22: mol_type = other RNA
  modified_base 1: mod_base = OTHER; note = 2'-O-methyladenosine-3'-phosphorothioate
  modified_base 2: mod_base = OTHER; note = 2'-fluorocytidine-3'-phosphorothioate
  modified_base 3: mod_base = OTHER; note = 2'-O-methylcytidine-3'-phosphorothioate
  modified_base 4: mod_base = OTHER; note = 2'-fluoroadenosine-3'-phosphate
  modified_base 5: mod_base = OTHER; note = 2'-O-methyladenosine-3'-phosphate
  modified_base 6: mod_base = OTHER; note = 2'-fluorouridine-3'-phosphate
  modified_base 7: mod_base = OTHER; note = 2'-O-methyluridine-3'-phosphate
  modified_base 8: mod_base = OTHER; note = 2'-fluorouridine-3'-phosphate
  modified_base 9: mod_base = OTHER; note = 2'-O-methyladenosine-3'-phosphate
  modified_base 10: mod_base = OTHER; note = 2'-fluorouridine-3'-phosphate
  modified_base 11: mod_base = OTHER; note = 2'-O-methylguanosine-3'-phosphate
  modified_base 12: mod_base = OTHER; note = 2'-fluorocytidine-3'-phosphate
  modified_base 13: mod_base = OTHER; note = 2'-O-methylcytidine-3'-phosphate
  modified_base 14: mod_base = OTHER; note = 2'-fluorouridine-3'-phosphate
  modified_base 15: mod_base = OTHER; note = 2'-O-methyladenosine-3'-phosphate
  modified_base 16: mod_base = OTHER; note = 2'-fluorocytidine-3'-phosphate
  modified_base 17: mod_base = OTHER; note = 2'-O-methyladenosine-3'-phosphate
  modified_base 18: mod_base = OTHER; note = 2'-fluoroguanosine-3'-phosphate
  modified_base 19: mod_base = OTHER; note = 2'-O-methylcytidine-3'-phosphate
  modified_base 20: mod_base = OTHER; note = 2'-O-methylcytidine-3'-phosphate
  modified_base 21: mod_base = OTHER; note = 2'-O-methyluridine-3'-phosphorothioate
  modified_base 22: mod_base = OTHER; note = 2'-O-methylcytidine-3'-phosphate
accaatttatgcctacagcctc

SEQ ID NO: 134 - RNA, 21 nt, synthetic construct
  source 1..21: mol_type = other RNA
  modified_base 1: mod_base = OTHER; note = 2'-O-methyluridine-3'-phosphorothioate
  modified_base 2: mod_base = OTHER; note = 2'-fluorocytidine-3'-phosphorothioate
  modified_base 3: mod_base = OTHER; note = 2'-O-methylcytidine-3'-phosphorothioate
  modified_base 4: mod_base = OTHER; note = 2'-fluoroadenosine-3'-phosphate
  modified_base 5: mod_base = OTHER; note = 2'-O-methyladenosine-3'-phosphate
  modified_base 6: mod_base = OTHER; note = 2'-fluorouridine-3'-phosphate
  modified_base 7: mod_base = OTHER; note = 2'-O-methyluridine-3'-phosphate
  modified_base 8: mod_base = OTHER; note = 2'-fluorouridine-3'-phosphate
  modified_base 9: mod_base = OTHER; note = 2'-O-methyladenosine-3'-phosphate
  modified_base 10: mod_base = OTHER; note = 2'-fluorouridine-3'-phosphate
  modified_base 11: mod_base = OTHER; note = 2'-O-methylguanosine-3'-phosphate
  modified_base 12: mod_base = OTHER; note = 2'-fluorocytidine-3'-phosphate
  modified_base 13: mod_base = OTHER; note = 2'-O-methylcytidine-3'-phosphate
  modified_base 14: mod_base = OTHER; note = 2'-fluorouridine-3'-phosphate
  modified_base 15: mod_base = OTHER; note = 2'-O-methyladenosine-3'-phosphate
  modified_base 16: mod_base = OTHER; note = 2'-fluorocytidine-3'-phosphate
  modified_base 17: mod_base = OTHER; note = 2'-O-methyladenosine-3'-phosphate
  modified_base 18: mod_base = OTHER; note = 2'-fluoroguanosine-3'-phosphate
  modified_base 19: mod_base = OTHER; note = 2'-O-methylcytidine-3'-phosphate
  modified_base 20: mod_base = OTHER; note = 2'-O-methyluridine-3'-phosphorothioate
  modified_base 21: mod_base = OTHER; note = 2'-O-methyluridine-3'-phosphate
tccaatttatgcctacagctt

SEQ ID NO: 135 - RNA, 22 nt, synthetic construct
  source 1..22: mol_type = other RNA
  modified_base 1: mod_base = OTHER; note = 2'-O-methyluridine-3'-phosphorothioate
  modified_base 2: mod_base = OTHER; note = 2'-fluorocytidine-3'-phosphorothioate
  modified_base 3: mod_base = OTHER; note = 2'-O-methylcytidine-3'-phosphorothioate
  modified_base 4: mod_base = OTHER; note = 2'-fluoroadenosine-3'-phosphate
  modified_base 5: mod_base = OTHER; note = 2'-O-methyladenosine-3'-phosphate
  modified_base 6: mod_base = OTHER; note = 2'-fluorouridine-3'-phosphate
  modified_base 7: mod_base = OTHER; note = 2'-O-methyluridine-3'-phosphate
  modified_base 8: mod_base = OTHER; note = 2'-fluorouridine-3'-phosphate
  modified_base 9: mod_base = OTHER; note = 2'-O-methyladenosine-3'-phosphate
  modified_base 10: mod_base = OTHER; note = 2'-fluorouridine-3'-phosphate
  modified_base 11: mod_base = OTHER; note = 2'-O-methylguanosine-3'-phosphate
  modified_base 12: mod_base = OTHER; note = 2'-fluorocytidine-3'-phosphate
  modified_base 13: mod_base = OTHER; note = 2'-O-methylcytidine-3'-phosphate
  modified_base 14: mod_base = OTHER; note = 2'-fluorouridine-3'-phosphate
  modified_base 15: mod_base = OTHER; note = 2'-O-methyladenosine-3'-phosphate
  modified_base 16: mod_base = OTHER; note = 2'-fluorocytidine-3'-phosphate
  modified_base 17: mod_base = OTHER; note = 2'-O-methyladenosine-3'-phosphate
  modified_base 18: mod_base = OTHER; note = 2'-fluoroguanosine-3'-phosphate
  modified_base 19: mod_base = OTHER; note = 2'-O-methylcytidine-3'-phosphate
  modified_base 20: mod_base = OTHER; note = 2'-O-methylcytidine-3'-phosphate
  modified_base 21: mod_base = OTHER; note = 2'-O-methyluridine-3'-phosphorothioate
  modified_base 22: mod_base = OTHER; note = 2'-O-methyluridine-3'-phosphate
tccaatttatgcctacagcctt

SEQ ID NO: 136 - RNA, 21 nt, synthetic construct
  source 1..21: mol_type = other RNA
  modified_base 1: mod_base = OTHER; note = cyclopropyl phosphonate-2'-O-methyluridine-3'-phosphorothioate
  modified_base 2: mod_base = OTHER; note = 2'-fluoroadenosine-3'-phosporothioate
  modified_base 3: mod_base = OTHER; note = 2'-O-methylcytidine-3'-phosphorothioate
  modified_base 4: mod_base = OTHER; note = 2'-fluorocytidine-3'-phosphate
  modified_base 5: mod_base = OTHER; note = 2'-O-methyladenosine-3'-phosphate
  modified_base 6: mod_base = OTHER; note = 2'-fluoroadenosine-3'-phosphate
  modified_base 7: mod_base = OTHER; note = 2'-O-methyluridine-3'-phosphate
  modified_base 8: mod_base = OTHER; note = 2'-fluorouridine-3'-phosphate
  modified_base 9: mod_base = OTHER; note = 2'-O-methyluridine-3'-phosphate
  modified_base 10: mod_base = OTHER; note = 2'-fluoroadenosine-3'-phosphate
  modified_base 11: mod_base = OTHER; note = 2'-O-methyluridine-3'-phosphate
  modified_base 12: mod_base = OTHER; note = 2'-fluoroguanosine-3'-phosphate
  modified_base 13: mod_base = OTHER; note = 2'-O-methylcytidine-3'-phosphate
  modified_base 14: mod_base = OTHER; note = 2'-fluorocytidine-3'-phosphate
  modified_base 15: mod_base = OTHER; note = 2'-O-methyluridine-3'-phosphate
  modified_base 16: mod_base = OTHER; note = 2'-fluoroadenosine-3'-phosphate
  modified_base 17: mod_base = OTHER; note = 2'-O-methylcytidine-3'-phosphate
  modified_base 18: mod_base = OTHER; note = 2'-fluoroadenosine-3'-phosphate
  modified_base 19: mod_base = OTHER; note = 2'-O-methylguanosine-3'-phosphate
  modified_base 20: mod_base = OTHER; note = 2'-O-methylcytidine-3'-phosphorothioate
  modified_base 21: mod_base = OTHER; note = 2'-O-methylcytidine-3'-phosphate
taccaatttatgcctacagcc

SEQ ID NO: 137 - RNA, 21 nt, synthetic construct
  source 1..21: mol_type = other RNA
  modified_base 1: mod_base = OTHER; note = 2'-O-methyluridine-3'-phosphorothioate
  modified_base 2: mod_base = OTHER; note = 2'-fluoroadenosine-3'-phosporothioate
  modified_base 3: mod_base = OTHER; note = 2'-O-methylcytidine-3'-phosphorothioate
  modified_base 4: mod_base = OTHER; note = 2'-fluorocytidine-3'-phosphate
  modified_base 5: mod_base = OTHER; note = 2'-O-methyladenosine-3'-phosphate
  modified_base 6: mod_base = OTHER; note = 2'-fluoroadenosine-3'-phosphate
  modified_base 7: mod_base = OTHER; note = 2'-O-methyluridine-3'-phosphate
  modified_base 8: mod_base = OTHER; note = 2'-fluorouridine-3'-phosphate
  modified_base 9: mod_base = OTHER; note = 2'-O-methyluridine-3'-phosphate
  modified_base 10: mod_base = OTHER; note = 2'-fluoroadenosine-3'-phosphate
  modified_base 11: mod_base = OTHER; note = 2'-O-methyluridine-3'-phosphate
  modified_base 12: mod_base = OTHER; note = 2'-fluoroguanosine-3'-phosphate
  modified_base 13: mod_base = OTHER; note = 2'-O-methylcytidine-3'-phosphate
  modified_base 14: mod_base = OTHER; note = 2'-fluorocytidine-3'-phosphate
  modified_base 15: mod_base = OTHER; note = 2'-O-methyluridine-3'-phosphate
  modified_base 16: mod_base = OTHER; note = 2'-fluoroadenosine-3'-phosphate
  modified_base 17: mod_base = OTHER; note = 2'-O-methylcytidine-3'-phosphate
  modified_base 18: mod_base = OTHER; note = 2'-fluoroadenosine-3'-phosphate
  modified_base 19: mod_base = OTHER; note = 2'-O-methylguanosine-3'-phosphorothioate
  modified_base 20: mod_base = OTHER; note = 2'-O-methylcytidine-3'-phosphorothioate
  modified_base 21: mod_base = OTHER; note = 2'-O-methylcytidine-3'-phosphate
taccaatttatgcctacagcc

SEQ ID NO: 138 - RNA, 21 nt, synthetic construct
  source 1..21: mol_type = other RNA
  modified_base 1: mod_base = OTHER; note = cyclopropyl phosphonate-2'-O-methyluridine-3'-phosphorothioate
  modified_base 2: mod_base = OTHER; note = 2'-fluoroadenosine-3'-phosporothioate
  modified_base 3: mod_base = OTHER; note = 2'-O-methylcytidine-3'-phosphorothioate
  modified_base 4: mod_base = OTHER; note = 2'-fluorocytidine-3'-phosphate
  modified_base 5: mod_base = OTHER; note = 2'-O-methyladenosine-3'-phosphate
  modified_base 6: mod_base = OTHER; note = 2'-fluoroadenosine-3'-phosphate
  modified_base 7: mod_base = OTHER; note = 2'-O-methyluridine-3'-phosphate
  modified_base 8: mod_base = OTHER; note = 2'-fluorouridine-3'-phosphate
  modified_base 9: mod_base = OTHER; note = 2'-O-methyluridine-3'-phosphate
  modified_base 10: mod_base = OTHER; note = 2'-fluoroadenosine-3'-phosphate
  modified_base 11: mod_base = OTHER; note = 2'-O-methyluridine-3'-phosphate
  modified_base 12: mod_base = OTHER; note = 2'-fluoroguanosine-3'-phosphate
  modified_base 13: mod_base = OTHER; note = 2'-O-methylcytidine-3'-phosphate
  modified_base 14: mod_base = OTHER; note = 2'-fluorocytidine-3'-phosphate
  modified_base 15: mod_base = OTHER; note = 2'-O-methyluridine-3'-phosphate
  modified_base 16: mod_base = OTHER; note = 2'-fluoroadenosine-3'-phosphate
  modified_base 17: mod_base = OTHER; note = 2'-O-methylcytidine-3'-phosphate
  modified_base 18: mod_base = OTHER; note = 2'-fluoroadenosine-3'-phosphate
  modified_base 19: mod_base = OTHER; note = 2'-O-methylguanosine-3'-phosphorothioate
  modified_base 20: mod_base = OTHER; note = 2'-O-methylcytidine-3'-phosphorothioate
  modified_base 21: mod_base = OTHER; note = 2'-O-methylcytidine-3'-phosphate
taccaatttatgcctacagcc

SEQ ID NO: 139 - RNA, 21 nt, synthetic construct
  source 1..21: mol_type = other RNA
  modified_base 1: mod_base = OTHER; note = 2'-O-methyluridine-3'-phosphorothioate
  modified_base 2: mod_base = OTHER; note = 2'-fluoroadenosine-3'-phosporothioate
  modified_base 3: mod_base = OTHER; note = 2'-O-methylcytidine-3'-phosphorothioate
  modified_base 4: mod_base = OTHER; note = 2'-fluorocytidine-3'-phosphate
  modified_base 5: mod_base = OTHER; note = 2'-O-methyladenosine-3'-phosphate
  modified_base 6: mod_base = OTHER; note = 2'-fluoroadenosine-3'-phosphate
  modified_base 7: mod_base = OTHER; note = 2'-O-methyluridine-3'-phosphate
  modified_base 8: mod_base = OTHER; note = 2'-fluorouridine-3'-phosphate
  modified_base 9: mod_base = OTHER; note = 2'-O-methyluridine-3'-phosphate
  modified_base 10: mod_base = OTHER; note = 2'-fluoroadenosine-3'-phosphate
  modified_base 11: mod_base = OTHER; note = 2'-O-methyluridine-3'-phosphate
  modified_base 12: mod_base = OTHER; note = 2'-fluoroguanosine-3'-phosphate
  modified_base 13: mod_base = OTHER; note = 2'-O-methylcytidine-3'-phosphate
  modified_base 14: mod_base = OTHER; note = 2'-fluorocytidine-3'-phosphate
  modified_base 15: mod_base = OTHER; note = 2'-O-methyluridine-3'-phosphate
  modified_base 16: mod_base = OTHER; note = 2'-fluoroadenosine-3'-phosphate
  modified_base 17: mod_base = OTHER; note = 2'-O-methylcytidine-3'-phosphate
  modified_base 18: mod_base = OTHER; note = 2'-fluoroadenosine-3'-phosphate
  modified_base 19: mod_base = OTHER; note = 2'-O-methylguanosine-3'-phosphate
  modified_base 20: mod_base = OTHER; note = 2'-O-methylcytidine-3'-phosphorothioate
  modified_base 21: mod_base = OTHER; note = 2'-O-methyluridine-3'-phosphate
taccaatttatgcctacagct

SEQ ID NO: 140 - RNA, 21 nt, synthetic construct
  source 1..21: mol_type = other RNA
  modified_base 1: mod_base = OTHER; note = 2'-O-methyluridine-3'-phosphorothioate
  modified_base 2: mod_base = OTHER; note = 2'-fluoroadenosine-3'-phosporothioate
  modified_base 3: mod_base = OTHER; note = 2'-O-methylcytidine-3'-phosphorothioate
  modified_base 4: mod_base = OTHER; note = 2'-fluorocytidine-3'-phosphate
  modified_base 5: mod_base = OTHER; note = 2'-O-methyladenosine-3'-phosphate
  modified_base 6: mod_base = OTHER; note = 2'-fluoroadenosine-3'-phosphate
  modified_base 7: mod_base = OTHER; note = 2'-O-methyluridine-3'-phosphate
  modified_base 8: mod_base = OTHER; note = 2'-fluorouridine-3'-phosphate
  modified_base 9: mod_base = OTHER; note = 2'-O-methyluridine-3'-phosphate
  modified_base 10: mod_base = OTHER; note = 2'-fluoroadenosine-3'-phosphate
  modified_base 11: mod_base = OTHER; note = 2'-O-methyluridine-3'-phosphate
  modified_base 12: mod_base = OTHER; note = 2'-fluoroguanosine-3'-phosphate
  modified_base 13: mod_base = OTHER; note = 2'-O-methylcytidine-3'-phosphate
  modified_base 14: mod_base = OTHER; note = 2'-fluorocytidine-3'-phosphate
  modified_base 15: mod_base = OTHER; note = 2'-O-methyluridine-3'-phosphate
  modified_base 16: mod_base = OTHER; note = 2'-fluoroadenosine-3'-phosphate
  modified_base 17: mod_base = OTHER; note = 2'-O-methylcytidine-3'-phosphate
  modified_base 18: mod_base = OTHER; note = 2'-fluoroadenosine-3'-phosphate
  modified_base 19: mod_base = OTHER; note = 2'-O-methylguanosine-3'-phosphate
  modified_base 20: mod_base = OTHER; note = 2'-O-methylcytidine-3'-phosphorothioate
  modified_base 21: mod_base = OTHER; note = 2'-O-methylguanosine-3'-phosphate
taccaatttatgcctacagcg

SEQ ID NO: 141 - RNA, 21 nt, synthetic construct
  source 1..21: mol_type = other RNA
  modified_base 1: mod_base = OTHER; note = 2'-O-methyladenosine-3'-phosphorothioate
  modified_base 2: mod_base = OTHER; note = 2'-fluoroadenosine-3'-phosporothioate
  modified_base 3: mod_base = OTHER; note = 2'-O-methylcytidine-3'-phosphorothioate
  modified_base 4: mod_base = OTHER; note = 2'-fluorocytidine-3'-phosphate
  modified_base 5: mod_base = OTHER; note = 2'-O-methyladenosine-3'-phosphate
  modified_base 6: mod_base = OTHER; note = 2'-fluoroadenosine-3'-phosphate
  modified_base 7: mod_base = OTHER; note = 2'-O-methyluridine-3'-phosphate
  modified_base 8: mod_base = OTHER; note = 2'-fluorouridine-3'-phosphate
  modified_base 9: mod_base = OTHER; note = 2'-O-methyluridine-3'-phosphate
  modified_base 10: mod_base = OTHER; note = 2'-fluoroadenosine-3'-phosphate
  modified_base 11: mod_base = OTHER; note = 2'-O-methyluridine-3'-phosphate
  modified_base 12: mod_base = OTHER; note = 2'-fluoroguanosine-3'-phosphate
  modified_base 13: mod_base = OTHER; note = 2'-O-methylcytidine-3'-phosphate
  modified_base 14: mod_base = OTHER; note = 2'-fluorocytidine-3'-phosphate
  modified_base 15: mod_base = OTHER; note = 2'-O-methyluridine-3'-phosphate
  modified_base 16: mod_base = OTHER; note = 2'-fluoroadenosine-3'-phosphate
  modified_base 17: mod_base = OTHER; note = 2'-O-methylcytidine-3'-phosphate
  modified_base 18: mod_base = OTHER; note = 2'-fluoroadenosine-3'-phosphate
  modified_base 19: mod_base = OTHER; note = 2'-O-methylguanosine-3'-phosphate
  modified_base 20: mod_base = OTHER; note = 2'-O-methylcytidine-3'-phosphorothioate
  modified_base 21: mod_base = OTHER; note = 2'-O-methylcytidine-3'-phosphate
aaccaatttatgcctacagcc

SEQ ID NO: 142 - RNA, 21 nt, synthetic construct
  source 1..21: mol_type = other RNA
  modified_base 1: mod_base = OTHER; note = 2'-O-methyluridine-3'-phosphorothioate
  modified_base 2: mod_base = OTHER; note = 2'-fluoroadenosine-3'-phosporothioate
  modified_base 3: mod_base = OTHER; note = 2'-O-methylcytidine-3'-phosphorothioate
  modified_base 4: mod_base = OTHER; note = 2'-fluorocytidine-3'-phosphate
  modified_base 5: mod_base = OTHER; note = 2'-O-methyladenosine-3'-phosphate
  modified_base 6: mod_base = OTHER; note = 2'-fluoroadenosine-3'-phosphate
  modified_base 7: mod_base = OTHER; note = 2'-O-methyluridine-3'-phosphate
  modified_base 8: mod_base = OTHER; note = 2'-fluorouridine-3'-phosphate
  modified_base 9: mod_base = OTHER; note = 2'-fluorouridine-3'-phosphate
  modified_base 10: mod_base = OTHER; note = 2'-fluoroadenosine-3'-phosphate
  modified_base 11: mod_base = OTHER; note = 2'-O-methyluridine-3'-phosphate
  modified_base 12: mod_base = OTHER; note = 2'-fluoroguanosine-3'-phosphate
  modified_base 13: mod_base = OTHER; note = 2'-O-methylcytidine-3'-phosphate
  modified_base 14: mod_base = OTHER; note = 2'-fluorocytidine-3'-phosphate
  modified_base 15: mod_base = OTHER; note = 2'-O-methyluridine-3'-phosphate
  modified_base 16: mod_base = OTHER; note = 2'-fluoroadenosine-3'-phosphate
  modified_base 17: mod_base = OTHER; note = 2'-O-methylcytidine-3'-phosphate
  modified_base 18: mod_base = OTHER; note = 2'-fluoroadenosine-3'-phosphate
  modified_base 19: mod_base = OTHER; note = 2'-O-methylguanosine-3'-phosphate
  modified_base 20: mod_base = OTHER; note = 2'-O-methyluridine-3'-phosphorothioate
  modified_base 21: mod_base = OTHER; note = 2'-O-methyluridine-3'-phosphate
taccaatttatgcctacagtt

SEQ ID NO: 143 - RNA, 21 nt, synthetic construct
  source 1..21: mol_type = other RNA
  modified_base 1: mod_base = OTHER; note = 2'-O-methyluridine-3'-phosphorothioate
  modified_base 2: mod_base = OTHER; note = 2'-fluoroadenosine-3'-phosporothioate
  modified_base 3: mod_base = OTHER; note = 2'-O-methylcytidine-3'-phosphorothioate
  modified_base 4: mod_base = OTHER; note = 2'-fluorocytidine-3'-phosphate
  modified_base 5: mod_base = OTHER; note = 2'-O-methyladenosine-3'-phosphate
  modified_base 6: mod_base = OTHER; note = 2'-fluoroadenosine-3'-phosphate
  modified_base 7: mod_base = OTHER; note = 2'-O-methyluridine-3'-phosphate
  modified_base 8: mod_base = OTHER; note = 2'-fluorouridine-3'-phosphate
  modified_base 9: mod_base = OTHER; note = 2'-O-methyluridine-3'-phosphate
  modified_base 10: mod_base = OTHER; note = 2'-fluoroadenosine-3'-phosphate
  modified_base 11: mod_base = OTHER; note = 2'-O-methyluridine-3'-phosphate
  modified_base 12: mod_base = OTHER; note = 2'-fluoroguanosine-3'-phosphate
  modified_base 13: mod_base = OTHER; note = 2'-O-methylcytidine-3'-phosphate
  modified_base 14: mod_base = OTHER; note = 2'-fluorocytidine-3'-phosphate
  modified_base 15: mod_base = OTHER; note = 2'-O-methyluridine-3'-phosphate
  modified_base 16: mod_base = OTHER; note = 2'-fluoroadenosine-3'-phosphate
  modified_base 17: mod_base = OTHER; note = 2'-O-methylcytidine-3'-phosphate
  modified_base 18: mod_base = OTHER; note = 2'-fluoroadenosine-3'-phosphate
  modified_base 19: mod_base = OTHER; note = 2'-O-methylguanosine-3'-phosphate
  modified_base 20: mod_base = OTHER; note = 2'-fluorocytidine-3'-phosphorothioate
  modified_base 21: mod_base = OTHER; note = 2'-O-methylcytidine-3'-phosphate
taccaatttatgcctacagcc

SEQ ID NO: 144 - RNA, 21 nt, synthetic construct
  source 1..21: mol_type = other RNA
  modified_base 1: mod_base = OTHER; note = 2'-O-methyladenosine-3'-phosphorothioate
  modified_base 2: mod_base = OTHER; note = 2'-fluorocytidine-3'-phosphorothioate
  modified_base 3: mod_base = OTHER; note = 2'-O-methylcytidine-3'-phosphate
  modified_base 4: mod_base = OTHER; note = 2'-fluoroadenosine-3'-phosphate
  modified_base 5: mod_base = OTHER; note = 2'-O-methyladenosine-3'-phosphate
  modified_base 6: mod_base = OTHER; note = 2'-fluorouridine-3'-phosphate
  modified_base 7: mod_base = OTHER; note = 2'-O-methyluridine-3'-phosphate
  modified_base 8: mod_base = OTHER; note = 2'-fluorouridine-3'-phosphate
  modified_base 9: mod_base = OTHER; note = 2'-O-methyladenosine-3'-phosphate
  modified_base 10: mod_base = OTHER; note = 2'-fluorouridine-3'-phosphate
  modified_base 11: mod_base = OTHER; note = 2'-O-methylguanosine-3'-phosphate
  modified_base 12: mod_base = OTHER; note = 2'-fluorocytidine-3'-phosphate
  modified_base 13: mod_base = OTHER; note = 2'-O-methylcytidine-3'-phosphate
  modified_base 14: mod_base = OTHER; note = 2'-fluorouridine-3'-phosphate
  modified_base 15: mod_base = OTHER; note = 2'-O-methyladenosine-3'-phosphate
  modified_base 16: mod_base = OTHER; note = 2'-fluorocytidine-3'-phosphate
  modified_base 17: mod_base = OTHER; note = 2'-O-methyladenosine-3'-phosphate
  modified_base 18: mod_base = OTHER; note = 2'-fluoroguanosine-3'-phosphate
  modified_base 19: mod_base = OTHER; note = 2'-O-methylcytidine-3'-phosphate
  modified_base 20: mod_base = OTHER; note = 2'-fluorocytidine-3'-phosphorothioate
  modified_base 21: mod_base = OTHER; note = 2'-O-methyluridine-3'-phosphate
accaatttatgcctacagcct

SEQ ID NO: 145 - RNA, 21 nt, synthetic construct
  source 1..21: mol_type = other RNA
  modified_base 1: mod_base = OTHER; note = 2'-O-methyluridine-3'-phosphorothioate
  modified_base 2: mod_base = OTHER; note = 2'-fluorocytidine-3'-phosphorothioate
  modified_base 3: mod_base = OTHER; note = 2'-O-methylcytidine-3'-phosphate
  modified_base 4: mod_base = OTHER; note = 2'-fluoroadenosine-3'-phosphate
  modified_base 5: mod_base = OTHER; note = 2'-O-methyladenosine-3'-phosphate
  modified_base 6: mod_base = OTHER; note = 2'-fluorouridine-3'-phosphate
  modified_base 7: mod_base = OTHER; note = 2'-O-methyluridine-3'-phosphate
  modified_base 8: mod_base = OTHER; note = 2'-fluorouridine-3'-phosphate
  modified_base 9: mod_base = OTHER; note = 2'-O-methyladenosine-3'-phosphate
  modified_base 10: mod_base = OTHER; note = 2'-fluorouridine-3'-phosphate
  modified_base 11: mod_base = OTHER; note = 2'-O-methylguanosine-3'-phosphate
  modified_base 12: mod_base = OTHER; note = 2'-fluorocytidine-3'-phosphate
  modified_base 13: mod_base = OTHER; note = 2'-O-methylcytidine-3'-phosphate
  modified_base 14: mod_base = OTHER; note = 2'-fluorouridine-3'-phosphate
  modified_base 15: mod_base = OTHER; note = 2'-O-methyladenosine-3'-phosphate
  modified_base 16: mod_base = OTHER; note = 2'-fluorocytidine-3'-phosphate
  modified_base 17: mod_base = OTHER; note = 2'-O-methyladenosine-3'-phosphate
  modified_base 18: mod_base = OTHER; note = 2'-fluoroguanosine-3'-phosphate
  modified_base 19: mod_base = OTHER; note = 2'-O-methylcytidine-3'-phosphate
  modified_base 20: mod_base = OTHER; note = 2'-fluorocytidine-3'-phosphorothioate
  modified_base 21: mod_base = OTHER; note = 2'-O-methyluridine-3'-phosphate
tccaatttatgcctacagcct

SEQ ID NO: 146 - RNA, 21 nt, synthetic construct
  source 1..21: mol_type = other RNA
  modified_base 1: mod_base = OTHER; note = 2'-O-methyladenosine-3'-phosphorothioate
  modified_base 2: mod_base = OTHER; note = 2'-fluorocytidine-3'-phosphorothioate
  modified_base 3: mod_base = OTHER; note = 2'-O-methylcytidine-3'-phosphate
  modified_base 4: mod_base = OTHER; note = 2'-fluoroadenosine-3'-phosphate
  modified_base 5: mod_base = OTHER; note = 2'-O-methyladenosine-3'-phosphate
  modified_base 6: mod_base = OTHER; note = 2'-fluorouridine-3'-phosphate
  modified_base 7: mod_base = OTHER; note = 2'-O-methyluridine-3'-phosphate
  modified_base 8: mod_base = OTHER; note = 2'-fluorouridine-3'-phosphate
  modified_base 9: mod_base = OTHER; note = 2'-O-methyladenosine-3'-phosphate
  modified_base 10: mod_base = OTHER; note = 2'-fluorouridine-3'-phosphate
  modified_base 11: mod_base = OTHER; note = 2'-O-methylguanosine-3'-phosphate
  modified_base 12: mod_base = OTHER; note = 2'-fluorocytidine-3'-phosphate
  modified_base 13: mod_base = OTHER; note = 2'-O-methylcytidine-3'-phosphate
  modified_base 14: mod_base = OTHER; note = 2'-fluorouridine-3'-phosphate
  modified_base 15: mod_base = OTHER; note = 2'-O-methyladenosine-3'-phosphate
  modified_base 16: mod_base = OTHER; note = 2'-fluorocytidine-3'-phosphate
  modified_base 17: mod_base = OTHER; note = 2'-O-methyladenosine-3'-phosphate
  modified_base 18: mod_base = OTHER; note = 2'-fluoroguanosine-3'-phosphate
  modified_base 19: mod_base = OTHER; note = 2'-O-methylcytidine-3'-phosphate
  modified_base 20: mod_base = OTHER; note = 2'-O-methylcytidine-3'-phosphorothioate
  modified_base 21: mod_base = OTHER; note = 2'-O-methylguanosine-3'-phosphate
accaatttatgcctacagccg

SEQ ID NO: 147 - RNA, 21 nt, synthetic construct
  source 1..21: mol_type = other RNA
  modified_base 1: mod_base = OTHER; note = 2'-O-methyluridine-3'-phosphorothioate
  modified_base 2: mod_base = OTHER; note = 2'-fluorocytidine-3'-phosphorothioate
  modified_base 3: mod_base = OTHER; note = 2'-O-methylcytidine-3'-phosphate
  modified_base 4: mod_base = OTHER; note = 2'-fluoroadenosine-3'-phosphate
  modified_base 5: mod_base = OTHER; note = 2'-O-methyladenosine-3'-phosphate
  modified_base 6: mod_base = OTHER; note = 2'-fluorouridine-3'-phosphate
  modified_base 7: mod_base = OTHER; note = 2'-O-methyluridine-3'-phosphate
  modified_base 8: mod_base = OTHER; note = 2'-fluorouridine-3'-phosphate
  modified_base 9: mod_base = OTHER; note = 2'-O-methyladenosine-3'-phosphate
  modified_base 10: mod_base = OTHER; note = 2'-fluorouridine-3'-phosphate
  modified_base 11: mod_base = OTHER; note = 2'-O-methylguanosine-3'-phosphate
  modified_base 12: mod_base = OTHER; note = 2'-fluorocytidine-3'-phosphate
  modified_base 13: mod_base = OTHER; note = 2'-O-methylcytidine-3'-phosphate
  modified_base 14: mod_base = OTHER; note = 2'-fluorouridine-3'-phosphate
  modified_base 15: mod_base = OTHER; note = 2'-O-methyladenosine-3'-phosphate
  modified_base 16: mod_base = OTHER; note = 2'-fluorocytidine-3'-phosphate
  modified_base 17: mod_base = OTHER; note = 2'-O-methyladenosine-3'-phosphate
  modified_base 18: mod_base = OTHER; note = 2'-fluoroguanosine-3'-phosphate
  modified_base 19: mod_base = OTHER; note = 2'-O-methylcytidine-3'-phosphate
  modified_base 20: mod_base = OTHER; note = 2'-O-methylcytidine-3'-phosphorothioate
  modified_base 21: mod_base = OTHER; note = 2'-O-methylguanosine-3'-phosphate
tccaatttatgcctacagccg

SEQ ID NO: 148 - RNA, 21 nt, synthetic construct
  source 1..21: mol_type = other RNA
  modified_base 1: mod_base = OTHER; note = 2'-O-methyluridine-3'-phosphorothioate
  modified_base 2: mod_base = OTHER; note = 2'-fluoroadenosine-3'-phosporothioate
  modified_base 3: mod_base = OTHER; note = 2'-O-methylcytidine-3'-phosphorothioate
  modified_base 4: mod_base = OTHER; note = 2'-fluorocytidine-3'-phosphate
  modified_base 5: mod_base = OTHER; note = 2'-O-methyladenosine-3'-phosphate
  modified_base 6: mod_base = OTHER; note = 2'-fluoroadenosine-3'-phosphate
  modified_base 7: mod_base = OTHER; note = 2'-O-methyluridine-3'-phosphate
  modified_base 8: mod_base = OTHER; note = 2'-fluorouridine-3'-phosphate
  modified_base 9: mod_base = OTHER; note = 2'-O-methyluridine-3'-phosphate
  modified_base 10: mod_base = OTHER; note = 2'-fluoroadenosine-3'-phosphate
  modified_base 11: mod_base = OTHER; note = 2'-O-methyluridine-3'-phosphate
  modified_base 12: mod_base = OTHER; note = 2'-fluoroguanosine-3'-phosphate
  modified_base 13: mod_base = OTHER; note = 2'-O-methylcytidine-3'-phosphate
  modified_base 14: mod_base = OTHER; note = 2'-fluorocytidine-3'-phosphate
  modified_base 15: mod_base = OTHER; note = 2'-O-methyluridine-3'-phosphate
  modified_base 16: mod_base = OTHER; note = 2'-fluoroadenosine-3'-phosphate
  modified_base 17: mod_base = OTHER; note = 2'-O-methylcytidine-3'-phosphate
  modified_base 18: mod_base = OTHER; note = 2'-fluoroadenosine-3'-phosphate
  modified_base 19: mod_base = OTHER; note = 2'-O-methylguanosine-3'-phosphate
  modified_base 20: mod_base = OTHER; note = 2'-O-methylguanosine-3'-phosphorothioate
  modified_base 21: mod_base = OTHER; note = 2'-O-methylguanosine-3'-phosphate
taccaatttatgcctacaggg

SEQ ID NO: 149 - RNA, 26 nt, synthetic construct
  source 1..26: mol_type = other RNA
taccaatttatgcctacaggccttat

SEQ ID NO: 150 - RNA, 23 nt, synthetic construct
  source 1..23: mol_type = other RNA
taccaatttatgcctacaggcct

SEQ ID NO: 151 - RNA, 21 nt, synthetic construct
  source 1..21: mol_type = other RNA
taccaatttatgcctacaggc

SEQ ID NO: 152 - RNA, 21 nt, synthetic construct
  source 1..21: mol_type = other RNA
tgtgaagcgaagtgcacactt

SEQ ID NO: 153 - RNA, 26 nt, synthetic construct
  source 1..26: mol_type = other RNA
taccaatttatgcctacagcctccgc

SEQ ID NO: 154 - RNA, 21 nt, synthetic construct
  source 1..21: mol_type = other RNA
taccaatttatgcctacagtt

SEQ ID NO: 155 - RNA, 21 nt, synthetic construct
  source 1..21: mol_type = other RNA
attgagagaagtccaccacga

SEQ ID NO: 156 - RNA, 21 nt, synthetic construct
  source 1..21: mol_type = other RNA
attgagagaagtccaccactt

SEQ ID NO: 157 - RNA, 21 nt, synthetic construct
  source 1..21: mol_type = other RNA
tttgagagaagtccaccacga

SEQ ID NO: 158 - RNA, 21 nt, synthetic construct
  source 1..21: mol_type = other RNA
aattgagagaagtccaccacg

SEQ ID NO: 159 - RNA, 21 nt, synthetic construct
  source 1..21: mol_type = other RNA
aattgagagaagtccaccatt

SEQ ID NO: 160 - RNA, 21 nt, synthetic construct
  source 1..21: mol_type = other RNA
tattgagagaagtccaccacg

SEQ ID NO: 161 - RNA, 21 nt, synthetic construct
  source 1..21: mol_type = other RNA
taccaatttatgcctacaggt

SEQ ID NO: 162 - RNA, 21 nt, synthetic construct
  source 1..21: mol_type = other RNA
taccaatttatgcctacagcc

SEQ ID NO: 163 - RNA, 23 nt, synthetic construct
  source 1..23: mol_type = other RNA
taccaatttatgcctacagcctt

SEQ ID NO: 164 - RNA, 23 nt, synthetic construct
  source 1..23: mol_type = other RNA
taccaatttatgcctacagcctc

SEQ ID NO: 165 - RNA, 21 nt, synthetic construct
  source 1..21: mol_type = other RNA
tttgagagaagtccaccactt

SEQ ID NO: 166 - RNA, 23 nt, synthetic construct
  source 1..23: mol_type = other RNA
attgagagaagtccaccacggtt

SEQ ID NO: 167 - RNA, 23 nt, synthetic construct
  source 1..23: mol_type = other RNA
attgagagaagtccaccacgagt

SEQ ID NO: 168 - RNA, 23 nt, synthetic construct
  source 1..23: mol_type = other RNA
tattgagagaagtccaccacgtt

SEQ ID NO: 169 - RNA, 23 nt, synthetic construct
  source 1..23: mol_type = other RNA
tattgagagaagtccaccacgag

SEQ ID NO: 170 - RNA, 22 nt, synthetic construct
  source 1..22: mol_type = other RNA
tattgagagaagtccaccacga

SEQ ID NO: 171 - RNA, 21 nt, synthetic construct
  source 1..21: mol_type = other RNA
agaaaattgagagaagtccac

SEQ ID NO: 172 - RNA, 22 nt, synthetic construct
  source 1..22: mol_type = other RNA
taccaatttatgcctacagctt

SEQ ID NO: 173 - RNA, 22 nt, synthetic construct
  source 1..22: mol_type = other RNA
taccaatttatgcctacagcct

SEQ ID NO: 174 - RNA, 21 nt, synthetic construct
  source 1..21: mol_type = other RNA
tattgagagaagtccaccatt

SEQ ID NO: 175 - RNA, 22 nt, synthetic construct
  source 1..22: mol_type = other RNA
tattgagagaagtccaccactt

SEQ ID NO: 176 - RNA, 22 nt, synthetic construct
  source 1..22: mol_type = other RNA
tttgagagaagtccaccacgtt

SEQ ID NO: 177 - RNA, 22 nt, synthetic construct
  source 1..22: mol_type = other RNA
tttgagagaagtccaccacgag

SEQ ID NO: 178 - RNA, 21 nt, synthetic construct
  source 1..21: mol_type = other RNA
agaaaattgagagaagtcctt

SEQ ID NO: 179 - RNA, 23 nt, synthetic construct
  source 1..23: mol_type = other RNA
agaaaattgagagaagtccactt

SEQ ID NO: 180 - RNA, 22 nt, synthetic construct
  source 1..22: mol_type = other RNA
agaaaattgagagaagtccacc

SEQ ID NO: 181 - RNA, 21 nt, synthetic construct
  source 1..21: mol_type = other RNA
tgaaaattgagagaagtccac

SEQ ID NO: 182 - RNA, 21 nt, synthetic construct
  source 1..21: mol_type = other RNA
accaatttatgcctacagctt

SEQ ID NO: 183 - RNA, 22 nt, synthetic construct
  source 1..22: mol_type = other RNA
accaatttatgcctacagcctt

SEQ ID NO: 184 - RNA, 22 nt, synthetic construct
  source 1..22: mol_type = other RNA
accaatttatgcctacagcctc

SEQ ID NO: 185 - RNA, 21 nt, synthetic construct
  source 1..21: mol_type = other RNA
tccaatttatgcctacagctt

SEQ ID NO: 186 - RNA, 22 nt, synthetic construct
  source 1..22: mol_type = other RNA
tccaatttatgcctacagcctt

SEQ ID NO: 187 - RNA, 21 nt, synthetic construct
  source 1..21: mol_type = other RNA
taccaatttatgcctacagct

SEQ ID NO: 188 - RNA, 21 nt, synthetic construct
  source 1..21: mol_type = other RNA
taccaatttatgcctacagcg

SEQ ID NO: 189 - RNA, 21 nt, synthetic construct
  source 1..21: mol_type = other RNA
aaccaatttatgcctacagcc

SEQ ID NO: 190 - RNA, 21 nt, synthetic construct
  source 1..21: mol_type = other RNA
accaatttatgcctacagcct

SEQ ID NO: 191 - RNA, 21 nt, synthetic construct
  source 1..21: mol_type = other RNA
tccaatttatgcctacagcct

SEQ ID NO: 192 - RNA, 21 nt, synthetic construct
  source 1..21: mol_type = other RNA
accaatttatgcctacagccg

SEQ ID NO: 193 - RNA, 21 nt, synthetic construct
  source 1..21: mol_type = other RNA
tccaatttatgcctacagccg

SEQ ID NO: 194 - RNA, 21 nt, synthetic construct
  source 1..21: mol_type = other RNA
taccaatttatgcctacaggg

SEQ ID NO: 195 - DNA, 25 bp, synthetic construct
  source 1..25: mol_type = other DNA
  modified_base 1: mod_base = OTHER; note 37-(((2R,3R,4R,5R,6R)-3-acetamido-4,5-diacetoxy-6-(acetoxym ethyl)tetrahydro-2H-pyran-2-yl)oxy)-23,28-bis((2-(2-(((2R,3 R,4R,5R,6R)-3-acetamido-4,5-diacetoxy-6-(acetoxymethyl)tetr ahydro-2H-pyran-2-yl)oxy)ethoxy)ethyl)carbamoyl)-21,26,31-t rioxo-3,6,9,12,15,18,35-heptaoxa-22,27,32-triazaheptatriaco ntyl phosphate-2'-O-methyluridine-3'-phosphate
  modified_base 2: mod_base = OTHER; note = 2'-O-methyluridine-3'-phosphorothioate
  modified_base 3: mod_base = OTHER; note = 2'-O-methylguanosine-3'-phosphorothioate
  modified_base 4: mod_base = OTHER; note = 2'-O-methylcytidine-3'-phosphate
  modified_base 5: mod_base = OTHER; note = 2'-O-methylcytidine-3'-phosphate
  modified_base 6: mod_base = OTHER; note = 2'-O-methyluridine-3'-phosphate
  modified_base 7: mod_base = OTHER; note = 2'-O-methylguanosine-3'-phosphate
  modified_base 8: mod_base = OTHER; note = 2'-O-methyluridine-3'-phosphate
  modified_base 9: mod_base = OTHER; note = 2'-O-methyladenosine-3'-phosphate
  modified_base 10: mod_base = OTHER; note = 2'-O-methylguanosine-3'-phosphate
  modified_base 11: mod_base = OTHER; note = 2'-fluoroguanosine-3'-phosphate
  modified_base 12: mod_base = OTHER; note = 2'-fluorocytidine-3'-phosphate
  modified_base 13: mod_base = OTHER; note = 2'-fluoroadenosine-3'-phosphate
  modified_base 14: mod_base = OTHER; note = 2'-O-methyluridine-3'-phosphate
  modified_base 15: mod_base = OTHER; note = 2'-O-methyladenosine-3'-phosphate
  modified_base 16: mod_base = OTHER; note = 2'-O-methyladenosine-3'-phosphate
  modified_base 17: mod_base = OTHER; note = 2'-O-methyladenosine-3'-phosphate
  modified_base 18: mod_base = OTHER; note = 2'-O-methyluridine-3'-phosphate
  modified_base 19: mod_base = OTHER; note = 2'-O-methyluridine-3'-phosphate
  modified_base 20: mod_base = OTHER; note = 2'-O-methylguanosine-3'-phosphate
  modified_base 21: mod_base = OTHER; note = 2'-O-methylguanosine-3'-phosphate
  modified_base 22: mod_base = OTHER; note = 2'-O-methyluridine-3'-phosphate
  modified_base 23: mod_base = OTHER; note = 2'-O-methyladenosine-3'-phosphate
  modified_base 24: mod_base = OTHER; note = 2'-O-methyluridine-3'-phosphorothioate
  modified_base 25: mod_base = OTHER; note = inverted 2'-deoxythymidine-3'-phosphate
  misc_feature 1..24: note = RNA
  misc_feature 25: note = DNA
ttgcctgtaggcataaattggtatt

SEQ ID NO: 196 - DNA, 26 bp, synthetic construct
  source 1..26: mol_type = other DNA
  modified_base 1: mod_base = OTHER; note 37-(((2R,3R,4R,5R,6R)-3-acetamido-4,5-diacetoxy-6-(acetoxym ethyl)tetrahydro-2H-pyran-2-yl)oxy)-23,28-bis((2-(2-(((2R,3 R,4R,5R,6R)-3-acetamido-4,5-diacetoxy-6-(acetoxymethyl)tetr ahydro-2H-pyran-2-yl)oxy)ethoxy)ethyl)carbamoyl)-21,26,31-t rioxo-3,6,9,12,15,18,35-heptaoxa-22,27,32-triazaheptatriaco ntyl phosphate-2'-O-methyluridine-3'-phosphate
  modified_base 2: mod_base = OTHER; note = 2'-O-methyladenosine-3'-phosphate
  modified_base 3: mod_base = OTHER; note = 2'-O-methyluridine-3'-phosphate
  modified_base 4: mod_base = OTHER; note = 2'-O-methyladenosine-3'-phosphate
  modified_base 5: mod_base = OTHER; note = 2'-O-methyluridine-3'-phosphorothioate
  modified_base 6: mod_base = OTHER; note = 2'-O-methylguanosine-3'-phosphorothioate
  modified_base 7: mod_base = OTHER; note = 2'-O-methylcytidine-3'-phosphate
  modified_base 8: mod_base = OTHER; note = 2'-O-methylcytidine-3'-phosphate
  modified_base 9: mod_base = OTHER; note = 2'-O-methyluridine-3'-phosphate
  modified_base 10: mod_base = OTHER; note = 2'-O-methylguanosine-3'-phosphate
  modified_base 11: mod_base = OTHER; note = 2'-O-methyluridine-3'-phosphate
  modified_base 12: mod_base = OTHER; note = 2'-O-methyladenosine-3'-phosphate
  modified_base 13: mod_base = OTHER; note = 2'-O-methylguanosine-3'-phosphate
  modified_base 14: mod_base = OTHER; note = 2'-fluoroguanosine-3'-phosphate
  modified_base 15: mod_base = OTHER; note = 2'-fluorocytidine-3'-phosphate
  modified_base 16: mod_base = OTHER; note = 2'-fluoroadenosine-3'-phosphate
  modified_base 17: mod_base = OTHER; note = 2'-O-methyluridine-3'-phosphate
  modified_base 18: mod_base = OTHER; note = 2'-O-methyladenosine-3'-phosphate
  modified_base 19: mod_base = OTHER; note = 2'-O-methyladenosine-3'-phosphate
  modified_base 20: mod_base = OTHER; note = 2'-O-methyladenosine-3'-phosphate
  modified_base 21: mod_base = OTHER; note = 2'-O-methyluridine-3'-phosphate
  modified_base 22: mod_base = OTHER; note = 2'-O-methyluridine-3'-phosphate
  modified_base 23: mod_base = OTHER; note = 2'-O-methylguanosine-3'-phosphate
  modified_base 24: mod_base = OTHER; note = 2'-O-methylguanosine-3'-phosphate
  modified_base 25: mod_base = OTHER; note = 2'-O-methyluridine-3'-phosphate
  modified_base 26: mod_base = OTHER; note = inverted 2'-deoxyadenosine-3'-phosphate
  misc_feature 1..25: note = RNA
  misc_feature 26: note = DNA
tatatgcctgtaggcataaattggta

SEQ ID NO: 197 - DNA, 26 bp, synthetic construct
  source 1..26: mol_type = other DNA
  modified_base 1: mod_base = OTHER; note 37-(((2R,3R,4R,5R,6R)-3-acetamido-4,5-diacetoxy-6-(acetoxym ethyl)tetrahydro-2H-pyran-2-yl)oxy)-23,28-bis((2-(2-(((2R,3 R,4R,5R,6R)-3-acetamido-4,5-diacetoxy-6-(acetoxymethyl)tetr ahydro-2H-pyran-2-yl)oxy)ethoxy)ethyl)carbamoyl)-21,26,31-t rioxo-3,6,9,12,15,18,35-heptaoxa-22,27,32-triazaheptatriaco ntyl phosphate-2'-O-methylguanosine-3'-phosphate
  modified_base 2: mod_base = OTHER; note = 2'-O-methylcytidine-3'-phosphate
  modified_base 3: mod_base = OTHER; note = 2'-O-methylguanosine-3'-phosphate
  modified_base 4: mod_base = OTHER; note = 2'-O-methylguanosine-3'-phosphate
  modified_base 5: mod_base = OTHER; note = 2'-O-methyladenosine-3'-phosphate
  modified_base 6: mod_base = OTHER; note = 2'-O-methylguanosine-3'-phosphorothioate
  modified_base 7: mod_base = OTHER; note = 2'-O-methylguanosine-3'-phosphate
  modified_base 8: mod_base = OTHER; note = 2'-O-methylcytidine-3'-phosphate
  modified_base 9: mod_base = OTHER; note = 2'-O-methyluridine-3'-phosphate
  modified_base 10: mod_base = OTHER; note = 2'-O-methylguanosine-3'-phosphate
  modified_base 11: mod_base = OTHER; note = 2'-O-methyluridine-3'-phosphate
  modified_base 12: mod_base = OTHER; note = 2'-O-methyladenosine-3'-phosphate
  modified_base 13: mod_base = OTHER; note = 2'-O-methylguanosine-3'-phosphate
  modified_base 14: mod_base = OTHER; note = 2'-fluoroguanosine-3'-phosphate
  modified_base 15: mod_base = OTHER; note = 2'-fluorocytidine-3'-phosphate
  modified_base 16: mod_base = OTHER; note = 2'-fluoroadenosine-3'-phosphate
  modified_base 17: mod_base = OTHER; note = 2'-O-methyluridine-3'-phosphate
  modified_base 18: mod_base = OTHER; note = 2'-O-methyladenosine-3'-phosphate
  modified_base 19: mod_base = OTHER; note = 2'-O-methyladenosine-3'-phosphate
  modified_base 20: mod_base = OTHER; note = 2'-O-methyladenosine-3'-phosphate
  modified_base 21: mod_base = OTHER; note = 2'-O-methyluridine-3'-phosphate
  modified_base 22: mod_base = OTHER; note = 2'-O-methyluridine-3'-phosphate
  modified_base 23: mod_base = OTHER; note = 2'-O-methylguanosine-3'-phosphate
  modified_base 24: mod_base = OTHER; note = 2'-O-methylguanosine-3'-phosphate
  modified_base 25: mod_base = OTHER; note = 2'-methoxyethylthymidine-3'-phosphate
  modified_base 26: mod_base = OTHER; note = inverted 2'-deoxyadenosine-3'-phosphate
  misc_feature 1..25: note = RNA
  misc_feature 26: note = DNA
gcggaggctgtaggcataaattggta

SEQ ID NO: 198 - DNA, 22 bp, synthetic construct
  source 1..22: mol_type = other DNA
  modified_base 1: mod_base = OTHER; note 37-(((2R,3R,4R,5R,6R)-3-acetamido-4,5-diacetoxy-6-(acetoxym ethyl)tetrahydro-2H-pyran-2-yl)oxy)-23,28-bis((2-(2-(((2R,3 R,4R,5R,6R)-3-acetamido-4,5-diacetoxy-6-(acetoxymethyl)tetr ahydro-2H-pyran-2-yl)oxy)ethoxy)ethyl)carbamoyl)-21,26,31-t rioxo-3,6,9,12,15,18,35-heptaoxa-22,27,32-triazaheptatriaco ntyl phosphorothioate-2'-O-methylcytidine-3'-phosphorothioate
  modified_base 2: mod_base = OTHER; note = 2'-O-methyluridine-3'-phosphate
  modified_base 3: mod_base = OTHER; note = 2'-O-methylguanosine-3'-phosphate
  modified_base 4: mod_base = OTHER; note = 2'-O-methyluridine-3'-phosphate
  modified_base 5: mod_base = OTHER; note = 2'-O-methyladenosine-3'-phosphate
  modified_base 6: mod_base = OTHER; note = 2'-O-methylguanosine-3'-phosphate
  modified_base 7: mod_base = OTHER; note = 2'-fluoroguanosine-3'-phosphate
  modified_base 8: mod_base = OTHER; note = 2'-fluorocytidine-3'-phosphate
  modified_base 9: mod_base = OTHER; note = 2'-fluoroadenosine-3'-phosphate
  modified_base 10: mod_base = OTHER; note = 2'-O-methyluridine-3'-phosphate
  modified_base 11: mod_base = OTHER; note = 2'-O-methyladenosine-3'-phosphate
  modified_base 12: mod_base = OTHER; note = 2'-O-methyladenosine-3'-phosphate
  modified_base 13: mod_base = OTHER; note = 2'-O-methyladenosine-3'-phosphate
  modified_base 14: mod_base = OTHER; note = 2'-O-methyluridine-3'-phosphate
  modified_base 15: mod_base = OTHER; note = 2'-O-methyluridine-3'-phosphate
  modified_base 16: mod_base = OTHER; note = 2'-O-methylguanosine-3'-phosphate
  modified_base 17: mod_base = OTHER; note = 2'-O-methylguanosine-3'-phosphate
  modified_base 18: mod_base = OTHER; note = 2'-O-methyluridine-3'-phosphate
  modified_base 19: mod_base = OTHER; note = 2'-O-methyladenosine-3'-phosphate
  modified_base 20: mod_base = OTHER; note = 2'-O-methyluridine-3'-phosphate
  modified_base 21: mod_base = OTHER; note = 2'-O-methyluridine-3'-phosphorothioate
  modified_base 22: mod_base = OTHER; note = inverted (3'-3' linked) abasic deoxyribonucleotide
  misc_feature 1..21: note = RNA
  misc_feature 22: note = DNA
ctgtaggcataaattggtattn

SEQ ID NO: 199 - DNA, 22 bp, synthetic construct
  source 1..22: mol_type = other DNA
  modified_base 1: mod_base = OTHER; note 37-(((2R,3R,4R,5R,6R)-3-acetamido-4,5-diacetoxy-6-(acetoxym ethyl)tetrahydro-2H-pyran-2-yl)oxy)-23,28-bis((2-(2-(((2R,3 R,4R,5R,6R)-3-acetamido-4,5-diacetoxy-6-(acetoxymethyl)tetr ahydro-2H-pyran-2-yl)oxy)ethoxy)ethyl)carbamoyl)-21,26,31-t rioxo-3,6,9,12,15,18,35-heptaoxa-22,27,32-triazaheptatriaco ntyl phosphorothioate-2'-O-methylguanosine-3'-phosphorothioate
  modified_base 2: mod_base = OTHER; note = 2'-O-methylcytidine-3'-phosphate
  modified_base 3: mod_base = OTHER; note = 2'-O-methylcytidine-3'-phosphate
  modified_base 4: mod_base = OTHER; note = 2'-O-methyluridine-3'-phosphate
  modified_base 5: mod_base = OTHER; note = 2'-O-methylguanosine-3'-phosphate
  modified_base 6: mod_base = OTHER; note = 2'-O-methyluridine-3'-phosphate
  modified_base 7: mod_base = OTHER; note = 2'-O-methyladenosine-3'-phosphate
  modified_base 8: mod_base = OTHER; note = 2'-O-methylguanosine-3'-phosphate
  modified_base 9: mod_base = OTHER; note = 2'-fluoroguanosine-3'-phosphate
  modified_base 10: mod_base = OTHER; note = 2'-fluorocytidine-3'-phosphate
  modified_base 11: mod_base = OTHER; note = 2'-fluoroadenosine-3'-phosphate
  modified_base 12: mod_base = OTHER; note = 2'-O-methyluridine-3'-phosphate
  modified_base 13: mod_base = OTHER; note = 2'-O-methyladenosine-3'-phosphate
  modified_base 14: mod_base = OTHER; note = 2'-O-methyladenosine-3'-phosphate
  modified_base 15: mod_base = OTHER; note = 2'-O-methyladenosine-3'-phosphate
  modified_base 16: mod_base = OTHER; note = 2'-O-methyluridine-3'-phosphate
  modified_base 17: mod_base = OTHER; note = 2'-O-methyluridine-3'-phosphate
  modified_base 18: mod_base = OTHER; note = 2'-O-methylguanosine-3'-phosphate
  modified_base 19: mod_base = OTHER; note = 2'-O-methylguanosine-3'-phosphate
  modified_base 20: mod_base = OTHER; note = 2'-O-methyluridine-3'-phosphate
  modified_base 21: mod_base = OTHER; note = 2'-O-methyladenosine-3'-phosphorothioate
  modified_base 22: mod_base = OTHER; note = inverted (3'-3' linked) abasic deoxyribonucleotide
  misc_feature 1..21: note = RNA
  misc_feature 22: note = DNA
gcctgtaggcataaattggtan

SEQ ID NO: 200 - DNA, 21 bp, synthetic construct
  source 1..21: mol_type = other DNA
  modified_base 1: mod_base = OTHER; note 37-(((2R,3R,4R,5R,6R)-3-acetamido-4,5-diacetoxy-6-(acetoxym ethyl)tetrahydro-2H-pyran-2-yl)oxy)-23,28-bis((2-(2-(((2R,3 R,4R,5R,6R)-3-acetamido-4,5-diacetoxy-6-(acetoxymethyl)tetr ahydro-2H-pyran-2-yl)oxy)ethoxy)ethyl)carbamoyl)-21,26,31-t rioxo-3,6,9,12,15,18,35-heptaoxa-22,27,32-triazaheptatriaco ntyl phosphorothioate-2'-O-methylguanosine-3'-phosphorothioate
  modified_base 2: mod_base = OTHER; note = 2'-O-methylcytidine-3'-phosphate
  modified_base 3: mod_base = OTHER; note = 2'-O-methylcytidine-3'-phosphate
  modified_base 4: mod_base = OTHER; note = 2'-O-methyluridine-3'-phosphate
  modified_base 5: mod_base = OTHER; note = 2'-O-methylguanosine-3'-phosphate
  modified_base 6: mod_base = OTHER; note = 2'-O-methyluridine-3'-phosphate
  modified_base 7: mod_base = OTHER; note = 2'-O-methyladenosine-3'-phosphate
  modified_base 8: mod_base = OTHER; note = 2'-O-methylguanosine-3'-phosphate
  modified_base 9: mod_base = OTHER; note = 2'-fluoroguanosine-3'-phosphate
  modified_base 10: mod_base = OTHER; note = 2'-fluorocytidine-3'-phosphate
  modified_base 11: mod_base = OTHER; note = 2'-fluoroadenosine-3'-phosphate
  modified_base 12: mod_base = OTHER; note = 2'-O-methyluridine-3'-phosphate
  modified_base 13: mod_base = OTHER; note = 2'-O-methyladenosine-3'-phosphate
  modified_base 14: mod_base = OTHER; note = 2'-O-methyladenosine-3'-phosphate
  modified_base 15: mod_base = OTHER; note = 2'-O-methyladenosine-3'-phosphate
  modified_base 16: mod_base = OTHER; note = 2'-O-methyluridine-3'-phosphate
  modified_base 17: mod_base = OTHER; note = 2'-O-methyluridine-3'-phosphate
  modified_base 18: mod_base = OTHER; note = 2'-O-methylguanosine-3'-phosphate
  modified_base 19: mod_base = OTHER; note = 2'-O-methylguanosine-3'-phosphate
  modified_base 20: mod_base = OTHER; note = 2'-O-methyluridine-3'-phosphorothioate
  modified_base 21: mod_base = OTHER; note = inverted 2'-deoxyadenosine-3'-phosphate
  misc_feature 1..20: note = RNA
  misc_feature 21: note = DNA
gcctgtaggcataaattggta

SEQ ID NO: 201 - DNA, 22 bp, synthetic construct
  source 1..22: mol_type = other DNA
  modified_base 1: mod_base = OTHER; note 37-(((2R,3R,4R,5R,6R)-3-acetamido-4,5-diacetoxy-6-(acetoxym ethyl)tetrahydro-2H-pyran-2-yl)oxy)-23,28-bis((2-(2-(((2R,3 R,4R,5R,6R)-3-acetamido-4,5-diacetoxy-6-(acetoxymethyl)tetr ahydro-2H-pyran-2-yl)oxy)ethoxy)ethyl)carbamoyl)-21,26,31-t rioxo-3,6,9,12,15,18,35-heptaoxa-22,27,32-triazaheptatriaco ntyl phosphorothioate-2'-O-methylguanosine-3'-phosphorothioate
  modified_base 2: mod_base = OTHER; note = 2'-O-methylcytidine-3'-phosphate
  modified_base 3: mod_base = OTHER; note = 2'-O-methylcytidine-3'-phosphate
  modified_base 4: mod_base = OTHER; note = 2'-O-methyluridine-3'-phosphate
  modified_base 5: mod_base = OTHER; note = 2'-O-methylguanosine-3'-phosphate
  modified_base 6: mod_base = OTHER; note = 2'-O-methyluridine-3'-phosphate
  modified_base 7: mod_base = OTHER; note = 2'-O-methyladenosine-3'-phosphate
  modified_base 8: mod_base = OTHER; note = 2'-O-methylguanosine-3'-phosphate
  modified_base 9: mod_base = OTHER; note = 2'-fluoroguanosine-3'-phosphate
  modified_base 10: mod_base = OTHER; note = 2'-fluorocytidine-3'-phosphate
  modified_base 11: mod_base = OTHER; note = 2'-fluoroadenosine-3'-phosphate
  modified_base 12: mod_base = OTHER; note = 2'-O-methyluridine-3'-phosphate
  modified_base 13: mod_base = OTHER; note = 2'-O-methyladenosine-3'-phosphate
  modified_base 14: mod_base = OTHER; note = 2'-O-methyladenosine-3'-phosphate
  modified_base 15: mod_base = OTHER; note = 2'-O-methyladenosine-3'-phosphate
  modified_base 16: mod_base = OTHER; note = 2'-O-methyluridine-3'-phosphate
  modified_base 17: mod_base = OTHER; note = 2'-O-methyluridine-3'-phosphate
  modified_base 18: mod_base = OTHER; note = 2'-O-methylguanosine-3'-phosphate
  modified_base 19: mod_base = OTHER; note = 2'-O-methylguanosine-3'-phosphate
  modified_base 20: mod_base = OTHER; note = 2'-O-methyluridine-3'-phosphate
  modified_base 21: mod_base = OTHER; note = 2'-methoxyethyladenosine-3'-phosphorothioate
  modified_base 22: mod_base = OTHER; note = inverted (3'-3' linked) abasic deoxyribonucleotide
  misc_feature 1..21: note = RNA
  misc_feature 22: note = DNA
gcctgtaggcataaattggtan

SEQ ID NO: 202 - DNA, 22 bp, synthetic construct
  source 1..22: mol_type = other DNA
  modified_base 1: mod_base = OTHER; note 37-(((2R,3R,4R,5R,6R)-3-acetamido-4,5-diacetoxy-6-(acetoxym ethyl)tetrahydro-2H-pyran-2-yl)oxy)-23,28-bis((2-(2-(((2R,3 R,4R,5R,6R)-3-acetamido-4,5-diacetoxy-6-(acetoxymethyl)tetr ahydro-2H-pyran-2-yl)oxy)ethoxy)ethyl)carbamoyl)-21,26,31-t rioxo-3,6,9,12,15,18,35-heptaoxa-22,27,32-triazaheptatriaco ntyl phosphorothioate-2'-O-methylguanosine-3'-phosphorothioate
  modified_base 2: mod_base = OTHER; note = 2'-O-methylcytidine-3'-phosphate
  modified_base 3: mod_base = OTHER; note = 2'-O-methylcytidine-3'-phosphate
  modified_base 4: mod_base = OTHER; note = 2'-O-methyluridine-3'-phosphate
  modified_base 5: mod_base = OTHER; note = 2'-O-methylguanosine-3'-phosphate
  modified_base 6: mod_base = OTHER; note = 2'-O-methyluridine-3'-phosphate
  modified_base 7: mod_base = OTHER; note = 2'-O-methyladenosine-3'-phosphate
  modified_base 8: mod_base = OTHER; note = 2'-O-methylguanosine-3'-phosphate
  modified_base 9: mod_base = OTHER; note = 2'-fluoroguanosine-3'-phosphate
  modified_base 10: mod_base = OTHER; note = 2'-fluorocytidine-3'-phosphate
  modified_base 11: mod_base = OTHER; note = 2'-fluoroadenosine-3'-phosphate
  modified_base 12: mod_base = OTHER; note = 2'-O-methyluridine-3'-phosphate
  modified_base 13: mod_base = OTHER; note = 2'-O-methyladenosine-3'-phosphate
  modified_base 14: mod_base = OTHER; note = 2'-O-methyladenosine-3'-phosphate
  modified_base 15: mod_base = OTHER; note = 2'-O-methyladenosine-3'-phosphate
  modified_base 16: mod_base = OTHER; note = 2'-O-methyluridine-3'-phosphate
  modified_base 17: mod_base = OTHER; note = 2'-O-methyluridine-3'-phosphate
  modified_base 18: mod_base = OTHER; note = 2'-O-methylguanosine-3'-phosphate
  modified_base 19: mod_base = OTHER; note = 2'-O-methylguanosine-3'-phosphate
  modified_base 20: mod_base = OTHER; note = 2'-methoxyethylthymidine-3'-phosphate
  modified_base 21: mod_base = OTHER; note = 2'-methoxyethyladenosine-3'-phosphorothioate
  modified_base 22: mod_base = OTHER; note = inverted (3'-3' linked) abasic deoxyribonucleotide
  misc_feature 1..21: note = RNA
  misc_feature 22: note = DNA
gcctgtaggcataaattggtan

SEQ ID NO: 203 - DNA, 22 bp, synthetic construct
  source 1..22: mol_type = other DNA
  modified_base 1: mod_base = OTHER; note 37-(((2R,3R,4R,5R,6R)-3-acetamido-4,5-diacetoxy-6-(acetoxym ethyl)tetrahydro-2H-pyran-2-yl)oxy)-23,28-bis((2-(2-(((2R,3 R,4R,5R,6R)-3-acetamido-4,5-diacetoxy-6-(acetoxymethyl)tetr ahydro-2H-pyran-2-yl)oxy)ethoxy)ethyl)carbamoyl)-21,26,31-t rioxo-3,6,9,12,15,18,35-heptaoxa-22,27,32-triazaheptatriaco ntyl phosphorothioate-2'-O-methyladenosine-3'-phosphorothioate
  modified_base 2: mod_base = OTHER; note = 2'-O-methyladenosine-3'-phosphate
  modified_base 3: mod_base = OTHER; note = 2'-O-methylcytidine-3'-phosphate
  modified_base 4: mod_base = OTHER; note = 2'-O-methyluridine-3'-phosphate
  modified_base 5: mod_base = OTHER; note = 2'-O-methylguanosine-3'-phosphate
  modified_base 6: mod_base = OTHER; note = 2'-O-methyluridine-3'-phosphate
  modified_base 7: mod_base = OTHER; note = 2'-O-methyladenosine-3'-phosphate
  modified_base 8: mod_base = OTHER; note = 2'-O-methylguanosine-3'-phosphate
  modified_base 9: mod_base = OTHER; note = 2'-fluoroguanosine-3'-phosphate
  modified_base 10: mod_base = OTHER; note = 2'-fluorocytidine-3'-phosphate
  modified_base 11: mod_base = OTHER; note = 2'-fluoroadenosine-3'-phosphate
  modified_base 12: mod_base = OTHER; note = 2'-O-methyluridine-3'-phosphate
  modified_base 13: mod_base = OTHER; note = 2'-O-methyladenosine-3'-phosphate
  modified_base 14: mod_base = OTHER; note = 2'-O-methyladenosine-3'-phosphate
  modified_base 15: mod_base = OTHER; note = 2'-O-methyladenosine-3'-phosphate
  modified_base 16: mod_base = OTHER; note = 2'-O-methyluridine-3'-phosphate
  modified_base 17: mod_base = OTHER; note = 2'-O-methyluridine-3'-phosphate
  modified_base 18: mod_base = OTHER; note = 2'-O-methylguanosine-3'-phosphate
  modified_base 19: mod_base = OTHER; note = 2'-O-methylguanosine-3'-phosphate
  modified_base 20: mod_base = OTHER; note = 2'-O-methyluridine-3'-phosphate
  modified_base 21: mod_base = OTHER; note = 2'-O-methyladenosine-3'-phosphorothioate
  modified_base 22: mod_base = OTHER; note = inverted (3'-3' linked) abasic deoxyribonucleotide
  misc_feature 1..21: note = RNA
  misc_feature 22: note = DNA
aactgtaggcataaattggtan

SEQ ID NO: 204 - DNA, 22 bp, synthetic construct
  source 1..22: mol_type = other DNA
  modified_base 1: mod_base = OTHER; note 37-(((2R,3R,4R,5R,6R)-3-acetamido-4,5-diacetoxy-6-(acetoxym ethyl)tetrahydro-2H-pyran-2-yl)oxy)-23,28-bis((2-(2-(((2R,3 R,4R,5R,6R)-3-acetamido-4,5-diacetoxy-6-(acetoxymethyl)tetr ahydro-2H-pyran-2-yl)oxy)ethoxy)ethyl)carbamoyl)-21,26,31-t rioxo-3,6,9,12,15,18,35-heptaoxa-22,27,32-triazaheptatriaco ntyl phosphorothioate-2'-O-methyluridine-3'-phosphorothioate
  modified_base 2: mod_base = OTHER; note = 2'-O-methylcytidine-3'-phosphate
  modified_base 3: mod_base = OTHER; note = 2'-O-methylguanosine-3'-phosphate
  modified_base 4: mod_base = OTHER; note = 2'-O-methyluridine-3'-phosphate
  modified_base 5: mod_base = OTHER; note = 2'-O-methylguanosine-3'-phosphate
  modified_base 6: mod_base = OTHER; note = 2'-O-methylguanosine-3'-phosphate
  modified_base 7: mod_base = OTHER; note = 2'-O-methyluridine-3'-phosphate
  modified_base 8: mod_base = OTHER; note = 2'-O-methylguanosine-3'-phosphate
  modified_base 9: mod_base = OTHER; note = 2'-fluoroguanosine-3'-phosphate
  modified_base 10: mod_base = OTHER; note = 2'-fluoroadenosine-3'-phosphate
  modified_base 11: mod_base = OTHER; note = 2'-fluorocytidine-3'-phosphate
  modified_base 12: mod_base = OTHER; note = 2'-O-methyluridine-3'-phosphate
  modified_base 13: mod_base = OTHER; note = 2'-O-methyluridine-3'-phosphate
  modified_base 14: mod_base = OTHER; note = 2'-O-methylcytidine-3'-phosphate
  modified_base 15: mod_base = OTHER; note = 2'-O-methyluridine-3'-phosphate
  modified_base 16: mod_base = OTHER; note = 2'-O-methylcytidine-3'-phosphate
  modified_base 17: mod_base = OTHER; note = 2'-O-methyluridine-3'-phosphate
  modified_base 18: mod_base = OTHER; note = 2'-O-methylcytidine-3'-phosphate
  modified_base 19: mod_base = OTHER; note = 2'-O-methyladenosine-3'-phosphate
  modified_base 20: mod_base = OTHER; note = 2'-O-methyladenosine-3'-phosphate
  modified_base 21: mod_base = OTHER; note = 2'-O-methyluridine-3'-phosphorothioate
  modified_base 22: mod_base = OTHER; note = inverted (3'-3' linked) abasic deoxyribonucleotide
  misc_feature 1..21: note = RNA
  misc_feature 22: note = DNA
tcgtggtggacttctctcaatn

SEQ ID NO: 205 - DNA, 22 bp, synthetic construct
  source 1..22: mol_type = other DNA
  modified_base 1: mod_base = OTHER; note 37-(((2R,3R,4R,5R,6R)-3-acetamido-4,5-diacetoxy-6-(acetoxym ethyl)tetrahydro-2H-pyran-2-yl)oxy)-23,28-bis((2-(2-(((2R,3 R,4R,5R,6R)-3-acetamido-4,5-diacetoxy-6-(acetoxymethyl)tetr ahydro-2H-pyran-2-yl)oxy)ethoxy)ethyl)carbamoyl)-21,26,31-t rioxo-3,6,9,12,15,18,35-heptaoxa-22,27,32-triazaheptatriaco ntyl phosphorothioate-2'-O-methyladenosine-3'-phosphorothioate
  modified_base 2: mod_base = OTHER; note = 2'-O-methyladenosine-3'-phosphate
  modified_base 3: mod_base = OTHER; note = 2'-O-methylguanosine-3'-phosphate
  modified_base 4: mod_base = OTHER; note = 2'-O-methyluridine-3'-phosphate
  modified_base 5: mod_base = OTHER; note = 2'-O-methylguanosine-3'-phosphate
  modified_base 6: mod_base = OTHER; note = 2'-O-methylguanosine-3'-phosphate
  modified_base 7: mod_base = OTHER; note = 2'-O-methyluridine-3'-phosphate
  modified_base 8: mod_base = OTHER; note = 2'-O-methylguanosine-3'-phosphate
  modified_base 9: mod_base = OTHER; note = 2'-fluoroguanosine-3'-phosphate
  modified_base 10: mod_base = OTHER; note = 2'-fluoroadenosine-3'-phosphate
  modified_base 11: mod_base = OTHER; note = 2'-fluorocytidine-3'-phosphate
  modified_base 12: mod_base = OTHER; note = 2'-O-methyluridine-3'-phosphate
  modified_base 13: mod_base = OTHER; note = 2'-O-methyluridine-3'-phosphate
  modified_base 14: mod_base = OTHER; note = 2'-O-methylcytidine-3'-phosphate
  modified_base 15: mod_base = OTHER; note = 2'-O-methyluridine-3'-phosphate
  modified_base 16: mod_base = OTHER; note = 2'-O-methylcytidine-3'-phosphate
  modified_base 17: mod_base = OTHER; note = 2'-O-methyluridine-3'-phosphate
  modified_base 18: mod_base = OTHER; note = 2'-O-methylcytidine-3'-phosphate
  modified_base 19: mod_base = OTHER; note = 2'-O-methyladenosine-3'-phosphate
  modified_base 20: mod_base = OTHER; note = 2'-O-methyladenosine-3'-phosphate
  modified_base 21: mod_base = OTHER; note = 2'-O-methyluridine-3'-phosphorothioate
  modified_base 22: mod_base = OTHER; note = inverted (3'-3' linked) abasic deoxyribonucleotide
  misc_feature 1..21: note = RNA
  misc_feature 22: note = DNA
aagtggtggacttctctcaatn

SEQ ID NO: 206 - DNA, 22 bp, synthetic construct
  source 1..22: mol_type = other DNA
  modified_base 1: mod_base = OTHER; note 37-(((2R,3R,4R,5R,6R)-3-acetamido-4,5-diacetoxy-6-(acetoxym ethyl)tetrahydro-2H-pyran-2-yl)oxy)-23,28-bis((2-(2-(((2R,3 R,4R,5R,6R)-3-acetamido-4,5-diacetoxy-6-(acetoxymethyl)tetr ahydro-2H-pyran-2-yl)oxy)ethoxy)ethyl)carbamoyl)-21,26,31-t rioxo-3,6,9,12,15,18,35-heptaoxa-22,27,32-triazaheptatriaco ntyl phosphorothioate-2'-O-methyluridine-3'-phosphorothioate
  modified_base 2: mod_base = OTHER; note = 2'-O-methylcytidine-3'-phosphate
  modified_base 3: mod_base = OTHER; note = 2'-O-methylguanosine-3'-phosphate
  modified_base 4: mod_base = OTHER; note = 2'-O-methyluridine-3'-phosphate
  modified_base 5: mod_base = OTHER; note = 2'-O-methylguanosine-3'-phosphate
  modified_base 6: mod_base = OTHER; note = 2'-O-methylguanosine-3'-phosphate
  modified_base 7: mod_base = OTHER; note = 2'-O-methyluridine-3'-phosphate
  modified_base 8: mod_base = OTHER; note = 2'-O-methylguanosine-3'-phosphate
  modified_base 9: mod_base = OTHER; note = 2'-fluoroguanosine-3'-phosphate
  modified_base 10: mod_base = OTHER; note = 2'-fluoroadenosine-3'-phosphate
  modified_base 11: mod_base = OTHER; note = 2'-fluorocytidine-3'-phosphate
  modified_base 12: mod_base = OTHER; note = 2'-O-methyluridine-3'-phosphate
  modified_base 13: mod_base = OTHER; note = 2'-O-methyluridine-3'-phosphate
  modified_base 14: mod_base = OTHER; note = 2'-O-methylcytidine-3'-phosphate
  modified_base 15: mod_base = OTHER; note = 2'-O-methyluridine-3'-phosphate
  modified_base 16: mod_base = OTHER; note = 2'-O-methylcytidine-3'-phosphate
  modified_base 17: mod_base = OTHER; note = 2'-O-methyluridine-3'-phosphate
  modified_base 18: mod_base = OTHER; note = 2'-O-methylcytidine-3'-phosphate
  modified_base 19: mod_base = OTHER; note = 2'-O-methyladenosine-3'-phosphate
  modified_base 20: mod_base = OTHER; note = 2'-methoxyethyladenosine-3'-phosphate
  modified_base 21: mod_base = OTHER; note = 2'-methoxyethylthymidine-3'-phosphorothioate
  modified_base 22: mod_base = OTHER; note = inverted (3'-3' linked) abasic deoxyribonucleotide
  misc_feature 1..21: note = RNA
  misc_feature 22: note = DNA
tcgtggtggacttctctcaatn

SEQ ID NO: 207 - DNA, 22 bp, synthetic construct
  source 1..22: mol_type = other DNA
  modified_base 1: mod_base = OTHER; note 37-(((2R,3R,4R,5R,6R)-3-acetamido-4,5-diacetoxy-6-(acetoxym ethyl)tetrahydro-2H-pyran-2-yl)oxy)-23,28-bis((2-(2-(((2R,3 R,4R,5R,6R)-3-acetamido-4,5-diacetoxy-6-(acetoxymethyl)tetr ahydro-2H-pyran-2-yl)oxy)ethoxy)ethyl)carbamoyl)-21,26,31-t rioxo-3,6,9,12,15,18,35-heptaoxa-22,27,32-triazaheptatriaco ntyl phosphorothioate-2'-O-methylcytidine-3'-phosphorothioate
  modified_base 2: mod_base = OTHER; note = 2'-O-methylguanosine-3'-phosphate
  modified_base 3: mod_base = OTHER; note = 2'-O-methyluridine-3'-phosphate
  modified_base 4: mod_base = OTHER; note = 2'-O-methylguanosine-3'-phosphate
  modified_base 5: mod_base = OTHER; note = 2'-O-methylguanosine-3'-phosphate
  modified_base 6: mod_base = OTHER; note = 2'-O-methyluridine-3'-phosphate
  modified_base 7: mod_base = OTHER; note = 2'-O-methylguanosine-3'-phosphate
  modified_base 8: mod_base = OTHER; note = 2'-O-methylguanosine-3'-phosphate
  modified_base 9: mod_base = OTHER; note = 2'-fluoroadenosine-3'-phosphate
  modified_base 10: mod_base = OTHER; note = 2'-fluorocytidine-3'-phosphate
  modified_base 11: mod_base = OTHER; note = 2'-fluorouridine-3'-phosphate
  modified_base 12: mod_base = OTHER; note = 2'-O-methyluridine-3'-phosphate
  modified_base 13: mod_base = OTHER; note = 2'-O-methylcytidine-3'-phosphate
  modified_base 14: mod_base = OTHER; note = 2'-O-methyluridine-3'-phosphate
  modified_base 15: mod_base = OTHER; note = 2'-O-methylcytidine-3'-phosphate
  modified_base 16: mod_base = OTHER; note = 2'-O-methyluridine-3'-phosphate
  modified_base 17: mod_base = OTHER; note = 2'-O-methylcytidine-3'-phosphate
  modified_base 18: mod_base = OTHER; note = 2'-O-methyladenosine-3'-phosphate
  modified_base 19: mod_base = OTHER; note = 2'-O-methyladenosine-3'-phosphate
  modified_base 20: mod_base = OTHER; note = 2'-O-methyluridine-3'-phosphate
  modified_base 21: mod_base = OTHER; note = 2'-O-methyluridine-3'-phosphorothioate
  modified_base 22: mod_base = OTHER; note = inverted (3'-3' linked) abasic deoxyribonucleotide
  misc_feature 1..21: note = RNA
  misc_feature 22: note = DNA
cgtggtggacttctctcaattn

SEQ ID NO: 208 - DNA, 22 bp, synthetic construct
  source 1..22: mol_type = other DNA
  modified_base 1: mod_base = OTHER; note 37-(((2R,3R,4R,5R,6R)-3-acetamido-4,5-diacetoxy-6-(acetoxym ethyl)tetrahydro-2H-pyran-2-yl)oxy)-23,28-bis((2-(2-(((2R,3 R,4R,5R,6R)-3-acetamido-4,5-diacetoxy-6-(acetoxymethyl)tetr ahydro-2H-pyran-2-yl)oxy)ethoxy)ethyl)carbamoyl)-21,26,31-t rioxo-3,6,9,12,15,18,35-heptaoxa-22,27,32-triazaheptatriaco ntyl phosphorothioate-2'-O-methyladenosine-3'-phosphorothioate
  modified_base 2: mod_base = OTHER; note = 2'-O-methyladenosine-3'-phosphate
  modified_base 3: mod_base = OTHER; note = 2'-O-methyluridine-3'-phosphate
  modified_base 4: mod_base = OTHER; note = 2'-O-methylguanosine-3'-phosphate
  modified_base 5: mod_base = OTHER; note = 2'-O-methylguanosine-3'-phosphate
  modified_base 6: mod_base = OTHER; note = 2'-O-methyluridine-3'-phosphate
  modified_base 7: mod_base = OTHER; note = 2'-O-methylguanosine-3'-phosphate
  modified_base 8: mod_base = OTHER; note = 2'-O-methylguanosine-3'-phosphate
  modified_base 9: mod_base = OTHER; note = 2'-fluoroadenosine-3'-phosphate
  modified_base 10: mod_base = OTHER; note = 2'-fluorocytidine-3'-phosphate
  modified_base 11: mod_base = OTHER; note = 2'-fluorouridine-3'-phosphate
  modified_base 12: mod_base = OTHER; note = 2'-O-methyluridine-3'-phosphate
  modified_base 13: mod_base = OTHER; note = 2'-O-methylcytidine-3'-phosphate
  modified_base 14: mod_base = OTHER; note = 2'-O-methyluridine-3'-phosphate
  modified_base 15: mod_base = OTHER; note = 2'-O-methylcytidine-3'-phosphate
  modified_base 16: mod_base = OTHER; note = 2'-O-methyluridine-3'-phosphate
  modified_base 17: mod_base = OTHER; note = 2'-O-methylcytidine-3'-phosphate
  modified_base 18: mod_base = OTHER; note = 2'-O-methyladenosine-3'-phosphate
  modified_base 19: mod_base = OTHER; note = 2'-O-methyladenosine-3'-phosphate
  modified_base 20: mod_base = OTHER; note = 2'-O-methyluridine-3'-phosphate
  modified_base 21: mod_base = OTHER; note = 2'-O-methyluridine-3'-phosphorothioate
  modified_base 22: mod_base = OTHER; note = inverted (3'-3' linked) abasic deoxyribonucleotide
  misc_feature 1..21: note = RNA
  misc_feature 22: note = DNA
aatggtggacttctctcaattn

SEQ ID NO: 209 - DNA, 22 bp, synthetic construct
  source 1..22: mol_type = other DNA
  modified_base 1: mod_base = OTHER; note 37-(((2R,3R,4R,5R,6R)-3-acetamido-4,5-diacetoxy-6-(acetoxym ethyl)tetrahydro-2H-pyran-2-yl)oxy)-23,28-bis((2-(2-(((2R,3 R,4R,5R,6R)-3-acetamido-4,5-diacetoxy-6-(acetoxymethyl)tetr ahydro-2H-pyran-2-yl)oxy)ethoxy)ethyl)carbamoyl)-21,26,31-t rioxo-3,6,9,12,15,18,35-heptaoxa-22,27,32-triazaheptatriaco ntyl phosphorothioate-2'-O-methylcytidine-3'-phosphorothioate
  modified_base 2: mod_base = OTHER; note = 2'-O-methylguanosine-3'-phosphate
  modified_base 3: mod_base = OTHER; note = 2'-O-methyluridine-3'-phosphate
  modified_base 4: mod_base = OTHER; note = 2'-O-methylguanosine-3'-phosphate
  modified_base 5: mod_base = OTHER; note = 2'-O-methylguanosine-3'-phosphate
  modified_base 6: mod_base = OTHER; note = 2'-O-methyluridine-3'-phosphate
  modified_base 7: mod_base = OTHER; note = 2'-O-methylguanosine-3'-phosphate
  modified_base 8: mod_base = OTHER; note = 2'-O-methylguanosine-3'-phosphate
  modified_base 9: mod_base = OTHER; note = 2'-fluoroadenosine-3'-phosphate
  modified_base 10: mod_base = OTHER; note = 2'-fluorocytidine-3'-phosphate
  modified_base 11: mod_base = OTHER; note = 2'-fluorouridine-3'-phosphate
  modified_base 12: mod_base = OTHER; note = 2'-O-methyluridine-3'-phosphate
  modified_base 13: mod_base = OTHER; note = 2'-O-methylcytidine-3'-phosphate
  modified_base 14: mod_base = OTHER; note = 2'-O-methyluridine-3'-phosphate
  modified_base 15: mod_base = OTHER; note = 2'-O-methylcytidine-3'-phosphate
  modified_base 16: mod_base = OTHER; note = 2'-O-methyluridine-3'-phosphate
  modified_base 17: mod_base = OTHER; note = 2'-O-methylcytidine-3'-phosphate
  modified_base 18: mod_base = OTHER; note = 2'-O-methyladenosine-3'-phosphate
  modified_base 19: mod_base = OTHER; note = 2'-O-methyladenosine-3'-phosphate
  modified_base 20: mod_base = OTHER; note = 2'-methoxyethylthymidine-3'-phosphate
  modified_base 21: mod_base = OTHER; note = 2'-methoxyethylthymidine-3'-phosphorothioate
  modified_base 22: mod_base = OTHER; note = inverted (3'-3' linked) abasic deoxyribonucleotide
  misc_feature 1..21: note = RNA
  misc_feature 22: note = DNA
cgtggtggacttctctcaattn

SEQ ID NO: 210 - DNA, 22 bp, synthetic construct
  source 1..22: mol_type = other DNA
  modified_base 1: mod_base = OTHER; note 37-(((2R,3R,4R,5R,6R)-3-acetamido-4,5-diacetoxy-6-(acetoxym ethyl)tetrahydro-2H-pyran-2-yl)oxy)-23,28-bis((2-(2-(((2R,3 R,4R,5R,6R)-3-acetamido-4,5-diacetoxy-6-(acetoxymethyl)tetr ahydro-2H-pyran-2-yl)oxy)ethoxy)ethyl)carbamoyl)-21,26,31-t rioxo-3,6,9,12,15,18,35-heptaoxa-22,27,32-triazaheptatriaco ntyl phosphorothioate-2'-O-methylguanosine-3'-phosphorothioate
  modified_base 2: mod_base = OTHER; note = 2'-O-methylguanosine-3'-phosphate
  modified_base 3: mod_base = OTHER; note = 2'-O-methyladenosine-3'-phosphate
  modified_base 4: mod_base = OTHER; note = 2'-O-methylcytidine-3'-phosphate
  modified_base 5: mod_base = OTHER; note = 2'-O-methyluridine-3'-phosphate
  modified_base 6: mod_base = OTHER; note = 2'-O-methyluridine-3'-phosphate
  modified_base 7: mod_base = OTHER; note = 2'-O-methylcytidine-3'-phosphate
  modified_base 8: mod_base = OTHER; note = 2'-O-methyluridine-3'-phosphate
  modified_base 9: mod_base = OTHER; note = 2'-fluorocytidine-3'-phosphate
  modified_base 10: mod_base = OTHER; note = 2'-fluorouridine-3'-phosphate
  modified_base 11: mod_base = OTHER; note = 2'-fluorocytidine-3'-phosphate
  modified_base 12: mod_base = OTHER; note = 2'-O-methyladenosine-3'-phosphate
  modified_base 13: mod_base = OTHER; note = 2'-O-methyladenosine-3'-phosphate
  modified_base 14: mod_base = OTHER; note = 2'-O-methyluridine-3'-phosphate
  modified_base 15: mod_base = OTHER; note = 2'-O-methyluridine-3'-phosphate
  modified_base 16: mod_base = OTHER; note = 2'-O-methyluridine-3'-phosphate
  modified_base 17: mod_base = OTHER; note = 2'-O-methyluridine-3'-phosphate
  modified_base 18: mod_base = OTHER; note = 2'-O-methylcytidine-3'-phosphate
  modified_base 19: mod_base = OTHER; note = 2'-O-methyluridine-3'-phosphate
  modified_base 20: mod_base = OTHER; note = 2'-O-methyladenosine-3'-phosphate
  modified_base 21: mod_base = OTHER; note = 2'-O-methyladenosine-3'-phosphorothioate
  modified_base 22: mod_base = OTHER; note = inverted (3'-3' linked) abasic deoxyribonucleotide
  misc_feature 1..21: note = RNA
  misc_feature 22: note = DNA
ggacttctctcaattttctaan

SEQ ID NO: 211 - DNA, 22 bp, synthetic construct
  source 1..22: mol_type = other DNA
  modified_base 1: mod_base = OTHER; note 37-(((2R,3R,4R,5R,6R)-3-acetamido-4,5-diacetoxy-6-(acetoxym ethyl)tetrahydro-2H-pyran-2-yl)oxy)-23,28-bis((2-(2-(((2R,3 R,4R,5R,6R)-3-acetamido-4,5-diacetoxy-6-(acetoxymethyl)tetr ahydro-2H-pyran-2-yl)oxy)ethoxy)ethyl)carbamoyl)-21,26,31-t rioxo-3,6,9,12,15,18,35-heptaoxa-22,27,32-triazaheptatriaco ntyl phosphorothioate-2'-O-methylcytidine-3'-phosphorothioate
  modified_base 2: mod_base = OTHER; note = 2'-O-methylguanosine-3'-phosphate
  modified_base 3: mod_base = OTHER; note = 2'-O-methyluridine-3'-phosphate
  modified_base 4: mod_base = OTHER; note = 2'-O-methylguanosine-3'-phosphate
  modified_base 5: mod_base = OTHER; note = 2'-O-methylguanosine-3'-phosphate
  modified_base 6: mod_base = OTHER; note = 2'-O-methyluridine-3'-phosphate
  modified_base 7: mod_base = OTHER; note = 2'-O-methylguanosine-3'-phosphate
  modified_base 8: mod_base = OTHER; note = 2'-O-methylguanosine-3'-phosphate
  modified_base 9: mod_base = OTHER; note = 2'-fluoroadenosine-3'-phosphate
  modified_base 10: mod_base = OTHER; note = 2'-fluorocytidine-3'-phosphate
  modified_base 11: mod_base = OTHER; note = 2'-fluorouridine-3'-phosphate
  modified_base 12: mod_base = OTHER; note = 2'-O-methyluridine-3'-phosphate
  modified_base 13: mod_base = OTHER; note = 2'-O-methylcytidine-3'-phosphate
  modified_base 14: mod_base = OTHER; note = 2'-O-methyluridine-3'-phosphate
  modified_base 15: mod_base = OTHER; note = 2'-O-methylcytidine-3'-phosphate
  modified_base 16: mod_base = OTHER; note = 2'-O-methyluridine-3'-phosphate
  modified_base 17: mod_base = OTHER; note = 2'-O-methylcytidine-3'-phosphate
  modified_base 18: mod_base = OTHER; note = 2'-O-methyladenosine-3'-phosphate
  modified_base 19: mod_base = OTHER; note = 2'-O-methyladenosine-3'-phosphate
  modified_base 20: mod_base = OTHER; note = 2'-O-methyluridine-3'-phosphate
  modified_base 21: mod_base = OTHER; note = 2'-O-methyladenosine-3'-phosphorothioate
  modified_base 22: mod_base = OTHER; note = inverted (3'-3' linked) abasic deoxyribonucleotide
  misc_feature 1..21: note = RNA
  misc_feature 22: note = DNA
cgtggtggacttctctcaatan

SEQ ID NO: 212 - DNA, 22 bp, synthetic construct
  source 1..22: mol_type = other DNA
  modified_base 1: mod_base = OTHER; note 37-(((2R,3R,4R,5R,6R)-3-acetamido-4,5-diacetoxy-6-(acetoxym ethyl)tetrahydro-2H-pyran-2-yl)oxy)-23,28-bis((2-(2-(((2R,3 R,4R,5R,6R)-3-acetamido-4,5-diacetoxy-6-(acetoxymethyl)tetr ahydro-2H-pyran-2-yl)oxy)ethoxy)ethyl)carbamoyl)-21,26,31-t rioxo-3,6,9,12,15,18,35-heptaoxa-22,27,32-triazaheptatriaco ntyl phosphorothioate-2'-O-methyluridine-3'-phosphorothioate
  modified_base 2: mod_base = OTHER; note = 2'-O-methylcytidine-3'-phosphate
  modified_base 3: mod_base = OTHER; note = 2'-O-methylguanosine-3'-phosphate
  modified_base 4: mod_base = OTHER; note = 2'-O-methyluridine-3'-phosphate
  modified_base 5: mod_base = OTHER; note = 2'-O-methylguanosine-3'-phosphate
  modified_base 6: mod_base = OTHER; note = 2'-O-methylguanosine-3'-phosphate
  modified_base 7: mod_base = OTHER; note = 2'-O-methyluridine-3'-phosphate
  modified_base 8: mod_base = OTHER; note = 2'-O-methylguanosine-3'-phosphate
  modified_base 9: mod_base = OTHER; note = 2'-fluoroguanosine-3'-phosphate
  modified_base 10: mod_base = OTHER; note = 2'-fluoroadenosine-3'-phosphate
  modified_base 11: mod_base = OTHER; note = 2'-fluorocytidine-3'-phosphate
  modified_base 12: mod_base = OTHER; note = 2'-O-methyluridine-3'-phosphate
  modified_base 13: mod_base = OTHER; note = 2'-O-methyluridine-3'-phosphate
  modified_base 14: mod_base = OTHER; note = 2'-O-methylcytidine-3'-phosphate
  modified_base 15: mod_base = OTHER; note = 2'-O-methyluridine-3'-phosphate
  modified_base 16: mod_base = OTHER; note = 2'-O-methylcytidine-3'-phosphate
  modified_base 17: mod_base = OTHER; note = 2'-O-methyluridine-3'-phosphate
  modified_base 18: mod_base = OTHER; note = 2'-O-methylcytidine-3'-phosphate
  modified_base 19: mod_base = OTHER; note = 2'-O-methyladenosine-3'-phosphate
  modified_base 20: mod_base = OTHER; note = 2'-O-methyladenosine-3'-phosphate
  modified_base 21: mod_base = OTHER; note = 2'-O-methyladenosine-3'-phosphorothioate
  modified_base 22: mod_base = OTHER; note = inverted (3'-3' linked) abasic deoxyribonucleotide
  misc_feature 1..21: note = RNA
  misc_feature 22: note = DNA
tcgtggtggacttctctcaaan

SEQ ID NO: 213 - DNA, 22 bp, synthetic construct
  source 1..22: mol_type = other DNA
  modified_base 1: mod_base = OTHER; note (1R,4s)-4-(3-(4-((S)-1,17-bis(((2R,3R,4R,5R,6R)-3-acetamido -4,5-diacetoxy-6-(acetoxymethyl)tetrahydro-2H-pyran-2-yl)ox y)-9-(2-((2-(2-(((2R,3R,4R,5R,6R)-3-acetamido-4,5-diacetoxy -6-(acetoxymethyl)tetrahydro-2H-pyran-2-yl)oxy)ethoxy)ethyl )amino)-2-oxoethyl)-7,11-dioxo-3,15-dioxa-6,9,12-triazahept adecan-8-yl)phenyl)propanoyl)cyclohexyl phosphorothioate-2'-O-methyladenosine-3'-phosphorothioate
  modified_base 2: mod_base = OTHER; note = 2'-O-methylcytidine-3'-phosphate
  modified_base 3: mod_base = OTHER; note = 2'-O-methylcytidine-3'-phosphate
  modified_base 4: mod_base = OTHER; note = 2'-O-methyluridine-3'-phosphate
  modified_base 5: mod_base = OTHER; note = 2'-O-methylguanosine-3'-phosphate
  modified_base 6: mod_base = OTHER; note = 2'-O-methyluridine-3'-phosphate
  modified_base 7: mod_base = OTHER; note = 2'-O-methyladenosine-3'-phosphate
  modified_base 8: mod_base = OTHER; note = 2'-O-methylguanosine-3'-phosphate
  modified_base 9: mod_base = OTHER; note = 2'-fluoroguanosine-3'-phosphate
  modified_base 10: mod_base = OTHER; note = 2'-fluorocytidine-3'-phosphate
  modified_base 11: mod_base = OTHER; note = 2'-fluoroadenosine-3'-phosphate
  modified_base 12: mod_base = OTHER; note = 2'-O-methyluridine-3'-phosphate
  modified_base 13: mod_base = OTHER; note = 2'-O-methyladenosine-3'-phosphate
  modified_base 14: mod_base = OTHER; note = 2'-O-methyladenosine-3'-phosphate
  modified_base 15: mod_base = OTHER; note = 2'-O-methyladenosine-3'-phosphate
  modified_base 16: mod_base = OTHER; note = 2'-O-methyluridine-3'-phosphate
  modified_base 17: mod_base = OTHER; note = 2'-O-methyluridine-3'-phosphate
  modified_base 18: mod_base = OTHER; note = 2'-O-methylguanosine-3'-phosphate
  modified_base 19: mod_base = OTHER; note = 2'-O-methylguanosine-3'-phosphate
  modified_base 20: mod_base = OTHER; note = 2'-O-methyluridine-3'-phosphate
  modified_base 21: mod_base = OTHER; note = 2'-O-methyladenosine-3'-phosphorothioate
  modified_base 22: mod_base = OTHER; note = inverted (3'-3' linked) abasic deoxyribonucleotide
  misc_feature 1..21: note = RNA
  misc_feature 22: note = DNA
acctgtaggcataaattggtan

SEQ ID NO: 214 - DNA, 21 bp, synthetic construct
  source 1..21: mol_type = other DNA
  modified_base 1: mod_base = OTHER; note (1R,4s)-4-(3-(4-((S)-1,17-bis(((2R,3R,4R,5R,6R)-3-acetamido -4,5-diacetoxy-6-(acetoxymethyl)tetrahydro-2H-pyran-2-yl)ox y)-9-(2-((2-(2-(((2R,3R,4R,5R,6R)-3-acetamido-4,5-diacetoxy -6-(acetoxymethyl)tetrahydro-2H-pyran-2-yl)oxy)ethoxy)ethyl )amino)-2-oxoethyl)-7,11-dioxo-3,15-dioxa-6,9,12-triazahept adecan-8-yl)phenyl)propanoyl)cyclohexyl phosphorothioate-inverted (3'-3' linked) abasic deoxyribonucleotide-5'-phosphorothioate
  modified_base 2: mod_base = OTHER; note = 2'-O-methylcytidine-3'-phosphate
  modified_base 3: mod_base = OTHER; note = 2'-O-methyluridine-3'-phosphate
  modified_base 4: mod_base = OTHER; note = 2'-O-methylguanosine-3'-phosphate
  modified_base 5: mod_base = OTHER; note = 2'-O-methyluridine-3'-phosphate
  modified_base 6: mod_base = OTHER; note = 2'-O-methyladenosine-3'-phosphate
  modified_base 7: mod_base = OTHER; note = 2'-O-methylguanosine-3'-phosphate
  modified_base 8: mod_base = OTHER; note = 2'-fluoroguanosine-3'-phosphate
  modified_base 9: mod_base = OTHER; note = 2'-fluorocytidine-3'-phosphate
  modified_base 10: mod_base = OTHER; note = 2'-fluoroadenosine-3'-phosphate
  modified_base 11: mod_base = OTHER; note = 2'-O-methyluridine-3'-phosphate
  modified_base 12: mod_base = OTHER; note = 2'-O-methyladenosine-3'-phosphate
  modified_base 13: mod_base = OTHER; note = 2'-O-methyladenosine-3'-phosphate
  modified_base 14: mod_base = OTHER; note = 2'-O-methyladenosine-3'-phosphate
  modified_base 15: mod_base = OTHER; note = 2'-O-methyluridine-3'-phosphate
  modified_base 16: mod_base = OTHER; note = 2'-O-methyluridine-3'-phosphate
  modified_base 17: mod_base = OTHER; note = 2'-O-methylguanosine-3'-phosphate
  modified_base 18: mod_base = OTHER; note = 2'-O-methylguanosine-3'-phosphate
  modified_base 19: mod_base = OTHER; note = 2'-O-methyluridine-3'-phosphate
  modified_base 20: mod_base = OTHER; note = 2'-O-methyladenosine-3'-phosphorothioate
  modified_base 21: mod_base = OTHER; note = inverted (3'-3' linked) abasic deoxyribonucleotide
  misc_feature 1: note = DNA
  misc_feature 2..20: note = RNA
  misc_feature 21: note = DNA
nctgtaggcataaattggtan

SEQ ID NO: 215 - DNA, 21 bp, synthetic construct
  source 1..21: mol_type = other DNA
  modified_base 1: mod_base = OTHER; note 37-(((2R,3R,4R,5R,6R)-3-acetamido-4,5-diacetoxy-6-(acetoxym ethyl)tetrahydro-2H-pyran-2-yl)oxy)-23,28-bis((2-(2-(((2R,3 R,4R,5R,6R)-3-acetamido-4,5-diacetoxy-6-(acetoxymethyl)tetr ahydro-2H-pyran-2-yl)oxy)ethoxy)ethyl)carbamoyl)-21,26,31-t rioxo-3,6,9,12,15,18,35-heptaoxa-22,27,32-triazaheptatriaco ntyl phosphorothioate-inverted (3'-3' linked) abasic deoxyribonucleotide-5'-phosphorothioate
  modified_base 2: mod_base = OTHER; note = 2'-O-methylcytidine-3'-phosphate
  modified_base 3: mod_base = OTHER; note = 2'-O-methyluridine-3'-phosphate
  modified_base 4: mod_base = OTHER; note = 2'-O-methylguanosine-3'-phosphate
  modified_base 5: mod_base = OTHER; note = 2'-O-methyluridine-3'-phosphate
  modified_base 6: mod_base = OTHER; note = 2'-O-methyladenosine-3'-phosphate
  modified_base 7: mod_base = OTHER; note = 2'-O-methylguanosine-3'-phosphate
  modified_base 8: mod_base = OTHER; note = 2'-fluoroguanosine-3'-phosphate
  modified_base 9: mod_base = OTHER; note = 2'-fluorocytidine-3'-phosphate
  modified_base 10: mod_base = OTHER; note = 2'-fluoroadenosine-3'-phosphate
  modified_base 11: mod_base = OTHER; note = 2'-O-methyluridine-3'-phosphate
  modified_base 12: mod_base = OTHER; note = 2'-O-methyladenosine-3'-phosphate
  modified_base 13: mod_base = OTHER; note = 2'-O-methyladenosine-3'-phosphate
  modified_base 14: mod_base = OTHER; note = 2'-O-methyladenosine-3'-phosphate
  modified_base 15: mod_base = OTHER; note = 2'-O-methyluridine-3'-phosphate
  modified_base 16: mod_base = OTHER; note = 2'-O-methyluridine-3'-phosphate
  modified_base 17: mod_base = OTHER; note = 2'-O-methylguanosine-3'-phosphate
  modified_base 18: mod_base = OTHER; note = 2'-O-methylguanosine-3'-phosphate
  modified_base 19: mod_base = OTHER; note = 2'-O-methyluridine-3'-phosphate
  modified_base 20: mod_base = OTHER; note = 2'-O-methyladenosine-3'-phosphorothioate
  modified_base 21: mod_base = OTHER; note = inverted (3'-3' linked) abasic deoxyribonucleotide
  misc_feature 1: note = DNA
  misc_feature 2..20: note = RNA
  misc_feature 21: note = DNA
nctgtaggcataaattggtan

SEQ ID NO: 216 - DNA, 21 bp, synthetic construct
  source 1..21: mol_type = other DNA
  modified_base 1: mod_base = OTHER; note 4-((1,22-bis(((2R,3R,4R,5R,6R)-3-acetamido-4,5-diacetoxy-6- (acetoxymethyl)tetrahydro-2H-pyran-2-yl)oxy)-10-((2-(2-(((2 R,3R,4R,5R,6R)-3-acetamido-4,5-diacetoxy-6-(acetoxymethyl)t etrahydro-2H-pyran-2-yl)oxy)ethoxy)ethyl)carbamoyl)-7,12,16 -trioxo-3,20-dioxa-6,11,17-triazadocosan-15-yl)carbamoyl)cy clohexyl phosphorothioate-inverted (3'-3' linked) abasic deoxyribonucleotide-5'-phosphorothioate
  modified_base 2: mod_base = OTHER; note = 2'-O-methylcytidine-3'-phosphate
  modified_base 3: mod_base = OTHER; note = 2'-O-methyluridine-3'-phosphate
  modified_base 4: mod_base = OTHER; note = 2'-O-methylguanosine-3'-phosphate
  modified_base 5: mod_base = OTHER; note = 2'-O-methyluridine-3'-phosphate
  modified_base 6: mod_base = OTHER; note = 2'-O-methyladenosine-3'-phosphate
  modified_base 7: mod_base = OTHER; note = 2'-O-methylguanosine-3'-phosphate
  modified_base 8: mod_base = OTHER; note = 2'-fluoroguanosine-3'-phosphate
  modified_base 9: mod_base = OTHER; note = 2'-fluorocytidine-3'-phosphate
  modified_base 10: mod_base = OTHER; note = 2'-fluoroadenosine-3'-phosphate
  modified_base 11: mod_base = OTHER; note = 2'-O-methyluridine-3'-phosphate
  modified_base 12: mod_base = OTHER; note = 2'-O-methyladenosine-3'-phosphate
  modified_base 13: mod_base = OTHER; note = 2'-O-methyladenosine-3'-phosphate
  modified_base 14: mod_base = OTHER; note = 2'-O-methyladenosine-3'-phosphate
  modified_base 15: mod_base = OTHER; note = 2'-O-methyluridine-3'-phosphate
  modified_base 16: mod_base = OTHER; note = 2'-O-methyluridine-3'-phosphate
  modified_base 17: mod_base = OTHER; note = 2'-O-methylguanosine-3'-phosphate
  modified_base 18: mod_base = OTHER; note = 2'-O-methylguanosine-3'-phosphate
  modified_base 19: mod_base = OTHER; note = 2'-O-methyluridine-3'-phosphate
  modified_base 20: mod_base = OTHER; note = 2'-O-methyladenosine-3'-phosphorothioate
  modified_base 21: mod_base = OTHER; note = inverted (3'-3' linked) abasic deoxyribonucleotide
  misc_feature 1: note = DNA
  misc_feature 2..20: note = RNA
  misc_feature 21: note = DNA
nctgtaggcataaattggtan

SEQ ID NO: 217 - DNA, 22 bp, synthetic construct
  source 1..22: mol_type = other DNA
  modified_base 1: mod_base = OTHER; note 37-(((2R,3R,4R,5R,6R)-3-acetamido-4,5-diacetoxy-6-(acetoxym ethyl)tetrahydro-2H-pyran-2-yl)oxy)-23,28-bis((2-(2-(((2R,3 R,4R,5R,6R)-3-acetamido-4,5-diacetoxy-6-(acetoxymethyl)tetr ahydro-2H-pyran-2-yl)oxy)ethoxy)ethyl)carbamoyl)-21,26,31-t rioxo-3,6,9,12,15,18,35-heptaoxa-22,27,32-triazaheptatriaco ntyl phosphorothioate-inverted (3'-3' linked) abasic deoxyribonucleotide-5'-phosphorothioate
  modified_base 2: mod_base = OTHER; note = 2'-O-methyladenosine-3'-phosphate
  modified_base 3: mod_base = OTHER; note = 2'-O-methylcytidine-3'-phosphate
  modified_base 4: mod_base = OTHER; note = 2'-O-methyluridine-3'-phosphate
  modified_base 5: mod_base = OTHER; note = 2'-O-methylguanosine-3'-phosphate
  modified_base 6: mod_base = OTHER; note = 2'-O-methyluridine-3'-phosphate
  modified_base 7: mod_base = OTHER; note = 2'-O-methyladenosine-3'-phosphate
  modified_base 8: mod_base = OTHER; note = 2'-O-methylguanosine-3'-phosphate
  modified_base 9: mod_base = OTHER; note = 2'-fluoroguanosine-3'-phosphate
  modified_base 10: mod_base = OTHER; note = 2'-fluorocytidine-3'-phosphate
  modified_base 11: mod_base = OTHER; note = 2'-fluoroadenosine-3'-phosphate
  modified_base 12: mod_base = OTHER; note = 2'-O-methyluridine-3'-phosphate
  modified_base 13: mod_base = OTHER; note = 2'-O-methyladenosine-3'-phosphate
  modified_base 14: mod_base = OTHER; note = 2'-O-methyladenosine-3'-phosphate
  modified_base 15: mod_base = OTHER; note = 2'-O-methyladenosine-3'-phosphate
  modified_base 16: mod_base = OTHER; note = 2'-O-methyluridine-3'-phosphate
  modified_base 17: mod_base = OTHER; note = 2'-O-methyluridine-3'-phosphate
  modified_base 18: mod_base = OTHER; note = 2'-O-methylguanosine-3'-phosphate
  modified_base 19: mod_base = OTHER; note = 2'-O-methylguanosine-3'-phosphate
  modified_base 20: mod_base = OTHER; note = 2'-O-methyluridine-3'-phosphate
  modified_base 21: mod_base = OTHER; note = 2'-O-methyladenosine-3'-phosphorothioate
  modified_base 22: mod_base = OTHER; note = inverted (3'-3' linked) abasic deoxyribonucleotide
  misc_feature 1: note = DNA
  misc_feature 2..21: note = RNA
  misc_feature 22: note = DNA
nactgtaggcataaattggtan

SEQ ID NO: 218 - DNA, 22 bp, synthetic construct
  source 1..22: mol_type = other DNA
  modified_base 1: mod_base = OTHER; note 37-(((2R,3R,4R,5R,6R)-3-acetamido-4,5-diacetoxy-6-(acetoxym ethyl)tetrahydro-2H-pyran-2-yl)oxy)-23,28-bis((2-(2-(((2R,3 R,4R,5R,6R)-3-acetamido-4,5-diacetoxy-6-(acetoxymethyl)tetr ahydro-2H-pyran-2-yl)oxy)ethoxy)ethyl)carbamoyl)-21,26,31-t rioxo-3,6,9,12,15,18,35-heptaoxa-22,27,32-triazaheptatriaco ntyl phosphorothioate-2'-O-methylguanosine-3'-phosphorothioate
  modified_base 2: mod_base = OTHER; note = 2'-O-methylguanosine-3'-phosphate
  modified_base 3: mod_base = OTHER; note = 2'-O-methylcytidine-3'-phosphate
  modified_base 4: mod_base = OTHER; note = 2'-O-methyluridine-3'-phosphate
  modified_base 5: mod_base = OTHER; note = 2'-O-methylguanosine-3'-phosphate
  modified_base 6: mod_base = OTHER; note = 2'-O-methyluridine-3'-phosphate
  modified_base 7: mod_base = OTHER; note = 2'-O-methyladenosine-3'-phosphate
  modified_base 8: mod_base = OTHER; note = 2'-O-methylguanosine-3'-phosphate
  modified_base 9: mod_base = OTHER; note = 2'-fluoroguanosine-3'-phosphate
  modified_base 10: mod_base = OTHER; note = 2'-fluorocytidine-3'-phosphate
  modified_base 11: mod_base = OTHER; note = 2'-fluoroadenosine-3'-phosphate
  modified_base 12: mod_base = OTHER; note = 2'-O-methyluridine-3'-phosphate
  modified_base 13: mod_base = OTHER; note = 2'-O-methyladenosine-3'-phosphate
  modified_base 14: mod_base = OTHER; note = 2'-O-methyladenosine-3'-phosphate
  modified_base 15: mod_base = OTHER; note = 2'-O-methyladenosine-3'-phosphate
  modified_base 16: mod_base = OTHER; note = 2'-O-methyluridine-3'-phosphate
  modified_base 17: mod_base = OTHER; note = 2'-O-methyluridine-3'-phosphate
  modified_base 18: mod_base = OTHER; note = 2'-O-methylguanosine-3'-phosphate
  modified_base 19: mod_base = OTHER; note = 2'-O-methylguanosine-3'-phosphate
  modified_base 20: mod_base = OTHER; note = 2'-O-methyluridine-3'-phosphate
  modified_base 21: mod_base = OTHER; note = 2'-O-methyladenosine-3'-phosphorothioate
  modified_base 22: mod_base = OTHER; note = inverted (3'-3' linked) abasic deoxyribonucleotide
  misc_feature 1..21: note = RNA
  misc_feature 22: note = DNA
ggctgtaggcataaattggtan

SEQ ID NO: 219 - DNA, 22 bp, synthetic construct
  source 1..22: mol_type = other DNA
  modified_base 1: mod_base = OTHER; note 4-((1,22-bis(((2R,3R,4R,5R,6R)-3-acetamido-4,5-diacetoxy-6- (acetoxymethyl)tetrahydro-2H-pyran-2-yl)oxy)-10-((2-(2-(((2 R,3R,4R,5R,6R)-3-acetamido-4,5-diacetoxy-6-(acetoxymethyl)t etrahydro-2H-pyran-2-yl)oxy)ethoxy)ethyl)carbamoyl)-7,12,16 -trioxo-3,20-dioxa-6,11,17-triazadocosan-15-yl)carbamoyl)cy clohexyl phosphorothioate-2'-O-methyladenosine-3'-phosphorothioate
  modified_base 2: mod_base = OTHER; note = 2'-O-methyladenosine-3'-phosphate
  modified_base 3: mod_base = OTHER; note = 2'-O-methylguanosine-3'-phosphate
  modified_base 4: mod_base = OTHER; note = 2'-O-methyluridine-3'-phosphate
  modified_base 5: mod_base = OTHER; note = 2'-O-methylguanosine-3'-phosphate
  modified_base 6: mod_base = OTHER; note = 2'-O-methylguanosine-3'-phosphate
  modified_base 7: mod_base = OTHER; note = 2'-O-methyluridine-3'-phosphate
  modified_base 8: mod_base = OTHER; note = 2'-O-methylguanosine-3'-phosphate
  modified_base 9: mod_base = OTHER; note = 2'-fluoroguanosine-3'-phosphate
  modified_base 10: mod_base = OTHER; note = 2'-fluoroadenosine-3'-phosphate
  modified_base 11: mod_base = OTHER; note = 2'-fluorocytidine-3'-phosphate
  modified_base 12: mod_base = OTHER; note = 2'-O-methyluridine-3'-phosphate
  modified_base 13: mod_base = OTHER; note = 2'-O-methyluridine-3'-phosphate
  modified_base 14: mod_base = OTHER; note = 2'-O-methylcytidine-3'-phosphate
  modified_base 15: mod_base = OTHER; note = 2'-O-methyluridine-3'-phosphate
  modified_base 16: mod_base = OTHER; note = 2'-O-methylcytidine-3'-phosphate
  modified_base 17: mod_base = OTHER; note = 2'-O-methyluridine-3'-phosphate
  modified_base 18: mod_base = OTHER; note = 2'-O-methylcytidine-3'-phosphate
  modified_base 19: mod_base = OTHER; note = 2'-O-methyladenosine-3'-phosphate
  modified_base 20: mod_base = OTHER; note = 2'-O-methyladenosine-3'-phosphate
  modified_base 21: mod_base = OTHER; note = 2'-O-methyluridine-3'-phosphorothioate
  modified_base 22: mod_base = OTHER; note = inverted (3'-3' linked) abasic deoxyribonucleotide
  misc_feature 1..21: note = RNA
  misc_feature 22: note = DNA
aagtggtggacttctctcaatn

SEQ ID NO: 220 - DNA, 22 bp, synthetic construct
  source 1..22: mol_type = other DNA
  modified_base 1: mod_base = OTHER; note 37-(((2R,3R,4R,5R,6R)-3-acetamido-4,5-diacetoxy-6-(acetoxym ethyl)tetrahydro-2H-pyran-2-yl)oxy)-23,28-bis((2-(2-(((2R,3 R,4R,5R,6R)-3-acetamido-4,5-diacetoxy-6-(acetoxymethyl)tetr ahydro-2H-pyran-2-yl)oxy)ethoxy)ethyl)carbamoyl)-21,26,31-t rioxo-3,6,9,12,15,18,35-heptaoxa-22,27,32-triazaheptatriaco ntyl phosphorothioate-2'-O-methyladenosine-3'-phosphorothioate
  modified_base 2: mod_base = OTHER; note = 2'-O-methyladenosine-3'-phosphate
  modified_base 3: mod_base = OTHER; note = 2'-O-methylguanosine-3'-phosphate
  modified_base 4: mod_base = OTHER; note = 2'-O-methyluridine-3'-phosphate
  modified_base 5: mod_base = OTHER; note = 2'-O-methylguanosine-3'-phosphate
  modified_base 6: mod_base = OTHER; note = 2'-O-methylguanosine-3'-phosphate
  modified_base 7: mod_base = OTHER; note = 2'-O-methyluridine-3'-phosphate
  modified_base 8: mod_base = OTHER; note = 2'-O-methylguanosine-3'-phosphate
  modified_base 9: mod_base = OTHER; note = 2'-fluoroguanosine-3'-phosphate
  modified_base 10: mod_base = OTHER; note = 2'-fluoroadenosine-3'-phosphate
  modified_base 11: mod_base = OTHER; note = 2'-fluorocytidine-3'-phosphate
  modified_base 12: mod_base = OTHER; note = 2'-O-methyluridine-3'-phosphate
  modified_base 13: mod_base = OTHER; note = 2'-O-methyluridine-3'-phosphate
  modified_base 14: mod_base = OTHER; note = 2'-O-methylcytidine-3'-phosphate
  modified_base 15: mod_base = OTHER; note = 2'-O-methyluridine-3'-phosphate
  modified_base 16: mod_base = OTHER; note = 2'-O-methylcytidine-3'-phosphate
  modified_base 17: mod_base = OTHER; note = 2'-O-methyluridine-3'-phosphate
  modified_base 18: mod_base = OTHER; note = 2'-O-methylcytidine-3'-phosphate
  modified_base 19: mod_base = OTHER; note = 2'-O-methyladenosine-3'-phosphate
  modified_base 20: mod_base = OTHER; note = 2'-O-methyladenosine-3'-phosphate
  modified_base 21: mod_base = OTHER; note = 2'-O-methyladenosine-3'-phosphorothioate
  modified_base 22: mod_base = OTHER; note = inverted (3'-3' linked) abasic deoxyribonucleotide
  misc_feature 1..21: note = RNA
  misc_feature 22: note = DNA
aagtggtggacttctctcaaan

SEQ ID NO: 221 - DNA, 22 bp, synthetic construct
  source 1..22: mol_type = other DNA
  modified_base 1: mod_base = OTHER; note 37-(((2R,3R,4R,5R,6R)-3-acetamido-4,5-diacetoxy-6-(acetoxym ethyl)tetrahydro-2H-pyran-2-yl)oxy)-23,28-bis((2-(2-(((2R,3 R,4R,5R,6R)-3-acetamido-4,5-diacetoxy-6-(acetoxymethyl)tetr ahydro-2H-pyran-2-yl)oxy)ethoxy)ethyl)carbamoyl)-21,26,31-t rioxo-3,6,9,12,15,18,35-heptaoxa-22,27,32-triazaheptatriaco ntyl phosphorothioate-2'-O-methylcytidine-3'-phosphorothioate
  modified_base 2: mod_base = OTHER; note = 2'-O-methylcytidine-3'-phosphate
  modified_base 3: mod_base = OTHER; note = 2'-O-methylguanosine-3'-phosphate
  modified_base 4: mod_base = OTHER; note = 2'-O-methyluridine-3'-phosphate
  modified_base 5: mod_base = OTHER; note = 2'-O-methylguanosine-3'-phosphate
  modified_base 6: mod_base = OTHER; note = 2'-O-methylguanosine-3'-phosphate
  modified_base 7: mod_base = OTHER; note = 2'-O-methyluridine-3'-phosphate
  modified_base 8: mod_base = OTHER; note = 2'-O-methylguanosine-3'-phosphate
  modified_base 9: mod_base = OTHER; note = 2'-fluoroguanosine-3'-phosphate
  modified_base 10: mod_base = OTHER; note = 2'-fluoroadenosine-3'-phosphate
  modified_base 11: mod_base = OTHER; note = 2'-fluorocytidine-3'-phosphate
  modified_base 12: mod_base = OTHER; note = 2'-O-methyluridine-3'-phosphate
  modified_base 13: mod_base = OTHER; note = 2'-O-methyluridine-3'-phosphate
  modified_base 14: mod_base = OTHER; note = 2'-O-methylcytidine-3'-phosphate
  modified_base 15: mod_base = OTHER; note = 2'-O-methyluridine-3'-phosphate
  modified_base 16: mod_base = OTHER; note = 2'-O-methylcytidine-3'-phosphate
  modified_base 17: mod_base = OTHER; note = 2'-O-methyluridine-3'-phosphate
  modified_base 18: mod_base = OTHER; note = 2'-O-methylcytidine-3'-phosphate
  modified_base 19: mod_base = OTHER; note = 2'-O-methyladenosine-3'-phosphate
  modified_base 20: mod_base = OTHER; note = 2'-O-methyladenosine-3'-phosphate
  modified_base 21: mod_base = OTHER; note = 2'-O-methyluridine-3'-phosphorothioate
  modified_base 22: mod_base = OTHER; note = inverted (3'-3' linked) abasic deoxyribonucleotide
  misc_feature 1..21: note = RNA
  misc_feature 22: note = DNA
ccgtggtggacttctctcaatn

SEQ ID NO: 222 - DNA, 23 bp, synthetic construct
  source 1..23: mol_type = other DNA
  modified_base 1: mod_base = OTHER; note 37-(((2R,3R,4R,5R,6R)-3-acetamido-4,5-diacetoxy-6-(acetoxym ethyl)tetrahydro-2H-pyran-2-yl)oxy)-23,28-bis((2-(2-(((2R,3 R,4R,5R,6R)-3-acetamido-4,5-diacetoxy-6-(acetoxymethyl)tetr ahydro-2H-pyran-2-yl)oxy)ethoxy)ethyl)carbamoyl)-21,26,31-t rioxo-3,6,9,12,15,18,35-heptaoxa-22,27,32-triazaheptatriaco ntyl phosphorothioate-inverted (3'-3' linked) abasic deoxyribonucleotide-5'-phosphorothioate
  modified_base 2: mod_base = OTHER; note = 2'-O-methylcytidine-3'-phosphate
  modified_base 3: mod_base = OTHER; note = 2'-O-methylcytidine-3'-phosphate
  modified_base 4: mod_base = OTHER; note = 2'-O-methylguanosine-3'-phosphate
  modified_base 5: mod_base = OTHER; note = 2'-O-methyluridine-3'-phosphate
  modified_base 6: mod_base = OTHER; note = 2'-O-methylguanosine-3'-phosphate
  modified_base 7: mod_base = OTHER; note = 2'-O-methylguanosine-3'-phosphate
  modified_base 8: mod_base = OTHER; note = 2'-O-methyluridine-3'-phosphate
  modified_base 9: mod_base = OTHER; note = 2'-O-methylguanosine-3'-phosphate
  modified_base 10: mod_base = OTHER; note = 2'-fluoroguanosine-3'-phosphate
  modified_base 11: mod_base = OTHER; note = 2'-fluoroadenosine-3'-phosphate
  modified_base 12: mod_base = OTHER; note = 2'-fluorocytidine-3'-phosphate
  modified_base 13: mod_base = OTHER; note = 2'-O-methyluridine-3'-phosphate
  modified_base 14: mod_base = OTHER; note = 2'-O-methyluridine-3'-phosphate
  modified_base 15: mod_base = OTHER; note = 2'-O-methylcytidine-3'-phosphate
  modified_base 16: mod_base = OTHER; note = 2'-O-methyluridine-3'-phosphate
  modified_base 17: mod_base = OTHER; note = 2'-O-methylcytidine-3'-phosphate
  modified_base 18: mod_base = OTHER; note = 2'-O-methyluridine-3'-phosphate
  modified_base 19: mod_base = OTHER; note = 2'-O-methylcytidine-3'-phosphate
  modified_base 20: mod_base = OTHER; note = 2'-O-methyladenosine-3'-phosphate
  modified_base 21: mod_base = OTHER; note = 2'-O-methyladenosine-3'-phosphate
  modified_base 22: mod_base = OTHER; note = 2'-O-methyluridine-3'-phosphorothioate
  modified_base 23: mod_base = OTHER; note = inverted (3'-3' linked) abasic deoxyribonucleotide
  misc_feature 1: note = DNA
  misc_feature 2..22: note = RNA
  misc_feature 23: note = DNA
nccgtggtggacttctctcaatn

SEQ ID NO: 223 - DNA, 23 bp, synthetic construct
  source 1..23: mol_type = other DNA
  modified_base 1: mod_base = OTHER; note 37-(((2R,3R,4R,5R,6R)-3-acetamido-4,5-diacetoxy-6-(acetoxym ethyl)tetrahydro-2H-pyran-2-yl)oxy)-23,28-bis((2-(2-(((2R,3 R,4R,5R,6R)-3-acetamido-4,5-diacetoxy-6-(acetoxymethyl)tetr ahydro-2H-pyran-2-yl)oxy)ethoxy)ethyl)carbamoyl)-21,26,31-t rioxo-3,6,9,12,15,18,35-heptaoxa-22,27,32-triazaheptatriaco ntyl phosphorothioate-2'-O-methylcytidine-3'-phosphorothioate
  modified_base 2: mod_base = OTHER; note = 2'-O-methyluridine-3'-phosphate
  modified_base 3: mod_base = OTHER; note = 2'-O-methylcytidine-3'-phosphate
  modified_base 4: mod_base = OTHER; note = 2'-O-methylguanosine-3'-phosphate
  modified_base 5: mod_base = OTHER; note = 2'-O-methyluridine-3'-phosphate
  modified_base 6: mod_base = OTHER; note = 2'-O-methylguanosine-3'-phosphate
  modified_base 7: mod_base = OTHER; note = 2'-O-methylguanosine-3'-phosphate
  modified_base 8: mod_base = OTHER; note = 2'-O-methyluridine-3'-phosphate
  modified_base 9: mod_base = OTHER; note = 2'-O-methylguanosine-3'-phosphate
  modified_base 10: mod_base = OTHER; note = 2'-fluoroguanosine-3'-phosphate
  modified_base 11: mod_base = OTHER; note = 2'-fluoroadenosine-3'-phosphate
  modified_base 12: mod_base = OTHER; note = 2'-fluorocytidine-3'-phosphate
  modified_base 13: mod_base = OTHER; note = 2'-O-methyluridine-3'-phosphate
  modified_base 14: mod_base = OTHER; note = 2'-O-methyluridine-3'-phosphate
  modified_base 15: mod_base = OTHER; note = 2'-O-methylcytidine-3'-phosphate
  modified_base 16: mod_base = OTHER; note = 2'-O-methyluridine-3'-phosphate
  modified_base 17: mod_base = OTHER; note = 2'-O-methylcytidine-3'-phosphate
  modified_base 18: mod_base = OTHER; note = 2'-O-methyluridine-3'-phosphate
  modified_base 19: mod_base = OTHER; note = 2'-O-methylcytidine-3'-phosphate
  modified_base 20: mod_base = OTHER; note = 2'-O-methyladenosine-3'-phosphate
  modified_base 21: mod_base = OTHER; note = 2'-O-methyladenosine-3'-phosphate
  modified_base 22: mod_base = OTHER; note = 2'-O-methyluridine-3'-phosphorothioate
  modified_base 23: mod_base = OTHER; note = inverted (3'-3' linked) abasic deoxyribonucleotide
  misc_feature 1..22: note = RNA
  misc_feature 23: note = DNA
ctcgtggtggacttctctcaatn

SEQ ID NO: 224 - DNA, 21 bp, synthetic construct
  source 1..21: mol_type = other DNA
  modified_base 1: mod_base = OTHER; note 37-(((2R,3R,4R,5R,6R)-3-acetamido-4,5-diacetoxy-6-(acetoxym ethyl)tetrahydro-2H-pyran-2-yl)oxy)-23,28-bis((2-(2-(((2R,3 R,4R,5R,6R)-3-acetamido-4,5-diacetoxy-6-(acetoxymethyl)tetr ahydro-2H-pyran-2-yl)oxy)ethoxy)ethyl)carbamoyl)-21,26,31-t rioxo-3,6,9,12,15,18,35-heptaoxa-22,27,32-triazaheptatriaco ntyl phosphorothioate-inverted (3'-3' linked) abasic deoxyribonucleotide-5'-phosphorothioate
  modified_base 2: mod_base = OTHER; note = 2'-O-methylguanosine-3'-phosphate
  modified_base 3: mod_base = OTHER; note = 2'-O-methyluridine-3'-phosphate
  modified_base 4: mod_base = OTHER; note = 2'-O-methylguanosine-3'-phosphate
  modified_base 5: mod_base = OTHER; note = 2'-O-methylguanosine-3'-phosphate
  modified_base 6: mod_base = OTHER; note = 2'-O-methyluridine-3'-phosphate
  modified_base 7: mod_base = OTHER; note = 2'-O-methylguanosine-3'-phosphate
  modified_base 8: mod_base = OTHER; note = 2'-fluoroguanosine-3'-phosphate
  modified_base 9: mod_base = OTHER; note = 2'-fluoroadenosine-3'-phosphate
  modified_base 10: mod_base = OTHER; note = 2'-fluorocytidine-3'-phosphate
  modified_base 11: mod_base = OTHER; note = 2'-O-methyluridine-3'-phosphate
  modified_base 12: mod_base = OTHER; note = 2'-O-methyluridine-3'-phosphate
  modified_base 13: mod_base = OTHER; note = 2'-O-methylcytidine-3'-phosphate
  modified_base 14: mod_base = OTHER; note = 2'-O-methyluridine-3'-phosphate
  modified_base 15: mod_base = OTHER; note = 2'-O-methylcytidine-3'-phosphate
  modified_base 16: mod_base = OTHER; note = 2'-O-methyluridine-3'-phosphate
  modified_base 17: mod_base = OTHER; note = 2'-O-methylcytidine-3'-phosphate
  modified_base 18: mod_base = OTHER; note = 2'-O-methyladenosine-3'-phosphate
  modified_base 19: mod_base = OTHER; note = 2'-O-methyladenosine-3'-phosphate
  modified_base 20: mod_base = OTHER; note = 2'-O-methyluridine-3'-phosphorothioate
  modified_base 21: mod_base = OTHER; note = inverted (3'-3' linked) abasic deoxyribonucleotide
  misc_feature 1: note = DNA
  misc_feature 2..20: note = RNA
  misc_feature 21: note = DNA
ngtggtggacttctctcaatn

SEQ ID NO: 225 - DNA, 23 bp, synthetic construct
  source 1..23: mol_type = other DNA
  modified_base 1: mod_base = OTHER; note 37-(((2R,3R,4R,5R,6R)-3-acetamido-4,5-diacetoxy-6-(acetoxym ethyl)tetrahydro-2H-pyran-2-yl)oxy)-23,28-bis((2-(2-(((2R,3 R,4R,5R,6R)-3-acetamido-4,5-diacetoxy-6-(acetoxymethyl)tetr ahydro-2H-pyran-2-yl)oxy)ethoxy)ethyl)carbamoyl)-21,26,31-t rioxo-3,6,9,12,15,18,35-heptaoxa-22,27,32-triazaheptatriaco ntyl phosphorothioate-inverted (3'-3' linked) abasic deoxyribonucleotide-5'-phosphorothioate
  modified_base 2: mod_base = OTHER; note = 2'-O-methylguanosine-3'-phosphate
  modified_base 3: mod_base = OTHER; note = 2'-O-methyluridine-3'-phosphate
  modified_base 4: mod_base = OTHER; note = 2'-O-methylguanosine-3'-phosphate
  modified_base 5: mod_base = OTHER; note = 2'-O-methylguanosine-3'-phosphate
  modified_base 6: mod_base = OTHER; note = 2'-O-methyluridine-3'-phosphate
  modified_base 7: mod_base = OTHER; note = 2'-O-methylguanosine-3'-phosphate
  modified_base 8: mod_base = OTHER; note = 2'-fluoroguanosine-3'-phosphate
  modified_base 9: mod_base = OTHER; note = 2'-fluoroadenosine-3'-phosphate
  modified_base 10: mod_base = OTHER; note = 2'-fluorocytidine-3'-phosphate
  modified_base 11: mod_base = OTHER; note = 2'-O-methyluridine-3'-phosphate
  modified_base 12: mod_base = OTHER; note = 2'-O-methyluridine-3'-phosphate
  modified_base 13: mod_base = OTHER; note = 2'-O-methylcytidine-3'-phosphate
  modified_base 14: mod_base = OTHER; note = 2'-O-methyluridine-3'-phosphate
  modified_base 15: mod_base = OTHER; note = 2'-O-methylcytidine-3'-phosphate
  modified_base 16: mod_base = OTHER; note = 2'-O-methyluridine-3'-phosphate
  modified_base 17: mod_base = OTHER; note = 2'-O-methylcytidine-3'-phosphate
  modified_base 18: mod_base = OTHER; note = 2'-O-methyladenosine-3'-phosphate
  modified_base 19: mod_base = OTHER; note = 2'-O-methyladenosine-3'-phosphate
  modified_base 20: mod_base = OTHER; note = 2'-O-methyluridine-3'-phosphate
  modified_base 21: mod_base = OTHER; note = 2'-O-methyluridine-3'-phosphorothioate
  modified_base 22: mod_base = OTHER; note = 2'-O-methyluridine-3'-phosphate
  modified_base 23: mod_base = OTHER; note = inverted (3'-3' linked) abasic deoxyribonucleotide
  misc_feature 1: note = DNA
  misc_feature 2..22: note = RNA
  misc_feature 23: note = DNA
ngtggtggacttctctcaatttn

SEQ ID NO: 226 - DNA, 23 bp, synthetic construct
  source 1..23: mol_type = other DNA
  modified_base 1: mod_base = OTHER; note 37-(((2R,3R,4R,5R,6R)-3-acetamido-4,5-diacetoxy-6-(acetoxym ethyl)tetrahydro-2H-pyran-2-yl)oxy)-23,28-bis((2-(2-(((2R,3 R,4R,5R,6R)-3-acetamido-4,5-diacetoxy-6-(acetoxymethyl)tetr ahydro-2H-pyran-2-yl)oxy)ethoxy)ethyl)carbamoyl)-21,26,31-t rioxo-3,6,9,12,15,18,35-heptaoxa-22,27,32-triazaheptatriaco ntyl phosphorothioate-2'-O-methyluridine-3'-phosphorothioate
  modified_base 2: mod_base = OTHER; note = 2'-O-methylcytidine-3'-phosphate
  modified_base 3: mod_base = OTHER; note = 2'-O-methylguanosine-3'-phosphate
  modified_base 4: mod_base = OTHER; note = 2'-O-methyluridine-3'-phosphate
  modified_base 5: mod_base = OTHER; note = 2'-O-methylguanosine-3'-phosphate
  modified_base 6: mod_base = OTHER; note = 2'-O-methylguanosine-3'-phosphate
  modified_base 7: mod_base = OTHER; note = 2'-O-methyluridine-3'-phosphate
  modified_base 8: mod_base = OTHER; note = 2'-O-methylguanosine-3'-phosphate
  modified_base 9: mod_base = OTHER; note = 2'-O-methylguanosine-3'-phosphate
  modified_base 10: mod_base = OTHER; note = 2'-fluoroadenosine-3'-phosphate
  modified_base 11: mod_base = OTHER; note = 2'-fluorocytidine-3'-phosphate
  modified_base 12: mod_base = OTHER; note = 2'-fluorouridine-3'-phosphate
  modified_base 13: mod_base = OTHER; note = 2'-O-methyluridine-3'-phosphate
  modified_base 14: mod_base = OTHER; note = 2'-O-methylcytidine-3'-phosphate
  modified_base 15: mod_base = OTHER; note = 2'-O-methyluridine-3'-phosphate
  modified_base 16: mod_base = OTHER; note = 2'-O-methylcytidine-3'-phosphate
  modified_base 17: mod_base = OTHER; note = 2'-O-methyluridine-3'-phosphate
  modified_base 18: mod_base = OTHER; note = 2'-O-methylcytidine-3'-phosphate
  modified_base 19: mod_base = OTHER; note = 2'-O-methyladenosine-3'-phosphate
  modified_base 20: mod_base = OTHER; note = 2'-O-methyladenosine-3'-phosphate
  modified_base 21: mod_base = OTHER; note = 2'-O-methyluridine-3'-phosphate
  modified_base 22: mod_base = OTHER; note = 2'-O-methyluridine-3'-phosphorothioate
  modified_base 23: mod_base = OTHER; note = inverted (3'-3' linked) abasic deoxyribonucleotide
  misc_feature 1..22: note = RNA
  misc_feature 23: note = DNA
tcgtggtggacttctctcaattn

SEQ ID NO: 227 - DNA, 21 bp, synthetic construct
  source 1..21: mol_type = other DNA
  modified_base 1: mod_base = OTHER; note 37-(((2R,3R,4R,5R,6R)-3-acetamido-4,5-diacetoxy-6-(acetoxym ethyl)tetrahydro-2H-pyran-2-yl)oxy)-23,28-bis((2-(2-(((2R,3 R,4R,5R,6R)-3-acetamido-4,5-diacetoxy-6-(acetoxymethyl)tetr ahydro-2H-pyran-2-yl)oxy)ethoxy)ethyl)carbamoyl)-21,26,31-t rioxo-3,6,9,12,15,18,35-heptaoxa-22,27,32-triazaheptatriaco ntyl phosphorothioate-inverted (3'-3' linked) abasic deoxyribonucleotide-5'-phosphorothioate
  modified_base 2: mod_base = OTHER; note = 2'-O-methyluridine-3'-phosphate
  modified_base 3: mod_base = OTHER; note = 2'-O-methylguanosine-3'-phosphate
  modified_base 4: mod_base = OTHER; note = 2'-O-methylguanosine-3'-phosphate
  modified_base 5: mod_base = OTHER; note = 2'-O-methyluridine-3'-phosphate
  modified_base 6: mod_base = OTHER; note = 2'-O-methylguanosine-3'-phosphate
  modified_base 7: mod_base = OTHER; note = 2'-O-methylguanosine-3'-phosphate
  modified_base 8: mod_base = OTHER; note = 2'-fluoroadenosine-3'-phosphate
  modified_base 9: mod_base = OTHER; note = 2'-fluorocytidine-3'-phosphate
  modified_base 10: mod_base = OTHER; note = 2'-fluorouridine-3'-phosphate
  modified_base 11: mod_base = OTHER; note = 2'-O-methyluridine-3'-phosphate
  modified_base 12: mod_base = OTHER; note = 2'-O-methylcytidine-3'-phosphate
  modified_base 13: mod_base = OTHER; note = 2'-O-methyluridine-3'-phosphate
  modified_base 14: mod_base = OTHER; note = 2'-O-methylcytidine-3'-phosphate
  modified_base 15: mod_base = OTHER; note = 2'-O-methyluridine-3'-phosphate
  modified_base 16: mod_base = OTHER; note = 2'-O-methylcytidine-3'-phosphate
  modified_base 17: mod_base = OTHER; note = 2'-O-methyladenosine-3'-phosphate
  modified_base 18: mod_base = OTHER; note = 2'-O-methyladenosine-3'-phosphate
  modified_base 19: mod_base = OTHER; note = 2'-O-methyluridine-3'-phosphate
  modified_base 20: mod_base = OTHER; note = 2'-O-methyluridine-3'-phosphorothioate
  modified_base 21: mod_base = OTHER; note = inverted (3'-3' linked) abasic deoxyribonucleotide
  misc_feature 1: note = DNA
  misc_feature 2..20: note = RNA
  misc_feature 21: note = DNA
ntggtggacttctctcaattn

SEQ ID NO: 228 - DNA, 21 bp, synthetic construct
  source 1..21: mol_type = other DNA
  modified_base 1: mod_base = OTHER; note 4-((1,22-bis(((2R,3R,4R,5R,6R)-3-acetamido-4,5-diacetoxy-6- (acetoxymethyl)tetrahydro-2H-pyran-2-yl)oxy)-10-((2-(2-(((2 R,3R,4R,5R,6R)-3-acetamido-4,5-diacetoxy-6-(acetoxymethyl)t etrahydro-2H-pyran-2-yl)oxy)ethoxy)ethyl)carbamoyl)-7,12,16 -trioxo-3,20-dioxa-6,11,17-triazadocosan-15-yl)carbamoyl)cy clohexyl phosphorothioate-inverted (3'-3' linked) abasic deoxyribonucleotide-5'-phosphorothioate
  modified_base 2: mod_base = OTHER; note = 2'-O-methyluridine-3'-phosphate
  modified_base 3: mod_base = OTHER; note = 2'-O-methylguanosine-3'-phosphate
  modified_base 4: mod_base = OTHER; note = 2'-O-methylguanosine-3'-phosphate
  modified_base 5: mod_base = OTHER; note = 2'-O-methyluridine-3'-phosphate
  modified_base 6: mod_base = OTHER; note = 2'-O-methylguanosine-3'-phosphate
  modified_base 7: mod_base = OTHER; note = 2'-O-methylguanosine-3'-phosphate
  modified_base 8: mod_base = OTHER; note = 2'-fluoroadenosine-3'-phosphate
  modified_base 9: mod_base = OTHER; note = 2'-fluorocytidine-3'-phosphate
  modified_base 10: mod_base = OTHER; note = 2'-fluorouridine-3'-phosphate
  modified_base 11: mod_base = OTHER; note = 2'-O-methyluridine-3'-phosphate
  modified_base 12: mod_base = OTHER; note = 2'-O-methylcytidine-3'-phosphate
  modified_base 13: mod_base = OTHER; note = 2'-O-methyluridine-3'-phosphate
  modified_base 14: mod_base = OTHER; note = 2'-O-methylcytidine-3'-phosphate
  modified_base 15: mod_base = OTHER; note = 2'-O-methyluridine-3'-phosphate
  modified_base 16: mod_base = OTHER; note = 2'-O-methylcytidine-3'-phosphate
  modified_base 17: mod_base = OTHER; note = 2'-O-methyladenosine-3'-phosphate
  modified_base 18: mod_base = OTHER; note = 2'-O-methyladenosine-3'-phosphate
  modified_base 19: mod_base = OTHER; note = 2'-O-methyluridine-3'-phosphate
  modified_base 20: mod_base = OTHER; note = 2'-O-methyluridine-3'-phosphorothioate
  modified_base 21: mod_base = OTHER; note = inverted (3'-3' linked) abasic deoxyribonucleotide
  misc_feature 1: note = DNA
  misc_feature 2..20: note = RNA
  misc_feature 21: note = DNA
ntggtggacttctctcaattn

SEQ ID NO: 229 - DNA, 23 bp, synthetic construct
  source 1..23: mol_type = other DNA
  modified_base 1: mod_base = OTHER; note 37-(((2R,3R,4R,5R,6R)-3-acetamido-4,5-diacetoxy-6-(acetoxym ethyl)tetrahydro-2H-pyran-2-yl)oxy)-23,28-bis((2-(2-(((2R,3 R,4R,5R,6R)-3-acetamido-4,5-diacetoxy-6-(acetoxymethyl)tetr ahydro-2H-pyran-2-yl)oxy)ethoxy)ethyl)carbamoyl)-21,26,31-t rioxo-3,6,9,12,15,18,35-heptaoxa-22,27,32-triazaheptatriaco ntyl phosphorothioate-inverted (3'-3' linked) abasic deoxyribonucleotide-5'-phosphorothioate
  modified_base 2: mod_base = OTHER; note = 2'-O-methylcytidine-3'-phosphate
  modified_base 3: mod_base = OTHER; note = 2'-O-methyluridine-3'-phosphate
  modified_base 4: mod_base = OTHER; note = 2'-O-methylguanosine-3'-phosphate
  modified_base 5: mod_base = OTHER; note = 2'-O-methyluridine-3'-phosphate
  modified_base 6: mod_base = OTHER; note = 2'-O-methyladenosine-3'-phosphate
  modified_base 7: mod_base = OTHER; note = 2'-O-methylguanosine-3'-phosphate
  modified_base 8: mod_base = OTHER; note = 2'-fluoroguanosine-3'-phosphate
  modified_base 9: mod_base = OTHER; note = 2'-fluorocytidine-3'-phosphate
  modified_base 10: mod_base = OTHER; note = 2'-fluoroadenosine-3'-phosphate
  modified_base 11: mod_base = OTHER; note = 2'-O-methyluridine-3'-phosphate
  modified_base 12: mod_base = OTHER; note = 2'-O-methyladenosine-3'-phosphate
  modified_base 13: mod_base = OTHER; note = 2'-O-methyladenosine-3'-phosphate
  modified_base 14: mod_base = OTHER; note = 2'-O-methyladenosine-3'-phosphate
  modified_base 15: mod_base = OTHER; note = 2'-O-methyluridine-3'-phosphate
  modified_base 16: mod_base = OTHER; note = 2'-O-methyluridine-3'-phosphate
  modified_base 17: mod_base = OTHER; note = 2'-O-methylguanosine-3'-phosphate
  modified_base 18: mod_base = OTHER; note = 2'-O-methylguanosine-3'-phosphate
  modified_base 19: mod_base = OTHER; note = 2'-O-methyluridine-3'-phosphate
  modified_base 20: mod_base = OTHER; note = 2'-O-methyladenosine-3'-phosphate
  modified_base 21: mod_base = OTHER; note = 2'-O-methyluridine-3'-phosphorothioate
  modified_base 22: mod_base = OTHER; note = 2'-O-methyluridine-3'-phosphate
  modified_base 23: mod_base = OTHER; note = inverted (3'-3' linked) abasic deoxyribonucleotide
  misc_feature 1: note = DNA
  misc_feature 2..22: note = RNA
  misc_feature 23: note = DNA
nctgtaggcataaattggtattn

SEQ ID NO: 230 - DNA, 24 bp, synthetic construct
  source 1..24: mol_type = other DNA
  modified_base 1: mod_base = OTHER; note 37-(((2R,3R,4R,5R,6R)-3-acetamido-4,5-diacetoxy-6-(acetoxym ethyl)tetrahydro-2H-pyran-2-yl)oxy)-23,28-bis((2-(2-(((2R,3 R,4R,5R,6R)-3-acetamido-4,5-diacetoxy-6-(acetoxymethyl)tetr ahydro-2H-pyran-2-yl)oxy)ethoxy)ethyl)carbamoyl)-21,26,31-t rioxo-3,6,9,12,15,18,35-heptaoxa-22,27,32-triazaheptatriaco ntyl phosphorothioate-inverted (3'-3' linked) abasic deoxyribonucleotide-5'-phosphorothioate
  modified_base 2: mod_base = OTHER; note = 2'-O-methylguanosine-3'-phosphate
  modified_base 3: mod_base = OTHER; note = 2'-O-methylcytidine-3'-phosphate
  modified_base 4: mod_base = OTHER; note = 2'-O-methyluridine-3'-phosphate
  modified_base 5: mod_base = OTHER; note = 2'-O-methylguanosine-3'-phosphate
  modified_base 6: mod_base = OTHER; note = 2'-O-methyluridine-3'-phosphate
  modified_base 7: mod_base = OTHER; note = 2'-O-methyladenosine-3'-phosphate
  modified_base 8: mod_base = OTHER; note = 2'-O-methylguanosine-3'-phosphate
  modified_base 9: mod_base = OTHER; note = 2'-fluoroguanosine-3'-phosphate
  modified_base 10: mod_base = OTHER; note = 2'-fluorocytidine-3'-phosphate
  modified_base 11: mod_base = OTHER; note = 2'-fluoroadenosine-3'-phosphate
  modified_base 12: mod_base = OTHER; note = 2'-O-methyluridine-3'-phosphate
  modified_base 13: mod_base = OTHER; note = 2'-O-methyladenosine-3'-phosphate
  modified_base 14: mod_base = OTHER; note = 2'-O-methyladenosine-3'-phosphate
  modified_base 15: mod_base = OTHER; note = 2'-O-methyladenosine-3'-phosphate
  modified_base 16: mod_base = OTHER; note = 2'-O-methyluridine-3'-phosphate
  modified_base 17: mod_base = OTHER; note = 2'-O-methyluridine-3'-phosphate
  modified_base 18: mod_base = OTHER; note = 2'-O-methylguanosine-3'-phosphate
  modified_base 19: mod_base = OTHER; note = 2'-O-methylguanosine-3'-phosphate
  modified_base 20: mod_base = OTHER; note = 2'-O-methyluridine-3'-phosphate
  modified_base 21: mod_base = OTHER; note = 2'-O-methyladenosine-3'-phosphate
  modified_base 22: mod_base = OTHER; note = 2'-O-methyluridine-3'-phosphorothioate
  modified_base 23: mod_base = OTHER; note = 2'-O-methyluridine-3'-phosphate
  modified_base 24: mod_base = OTHER; note = inverted (3'-3' linked) abasic deoxyribonucleotide
  misc_feature 1: note = DNA
  misc_feature 2..23: note = RNA
  misc_feature 24: note = DNA
ngctgtaggcataaattggtattn

SEQ ID NO: 231 - DNA, 25 bp, synthetic construct
  source 1..25: mol_type = other DNA
  modified_base 1: mod_base = OTHER; note 37-(((2R,3R,4R,5R,6R)-3-acetamido-4,5-diacetoxy-6-(acetoxym ethyl)tetrahydro-2H-pyran-2-yl)oxy)-23,28-bis((2-(2-(((2R,3 R,4R,5R,6R)-3-acetamido-4,5-diacetoxy-6-(acetoxymethyl)tetr ahydro-2H-pyran-2-yl)oxy)ethoxy)ethyl)carbamoyl)-21,26,31-t rioxo-3,6,9,12,15,18,35-heptaoxa-22,27,32-triazaheptatriaco ntyl phosphorothioate-inverted (3'-3' linked) abasic deoxyribonucleotide-5'-phosphorothioate
  modified_base 2: mod_base = OTHER; note = 2'-O-methylguanosine-3'-phosphate
  modified_base 3: mod_base = OTHER; note = 2'-O-methylguanosine-3'-phosphate
  modified_base 4: mod_base = OTHER; note = 2'-O-methylcytidine-3'-phosphate
  modified_base 5: mod_base = OTHER; note = 2'-O-methyluridine-3'-phosphate
  modified_base 6: mod_base = OTHER; note = 2'-O-methylguanosine-3'-phosphate
  modified_base 7: mod_base = OTHER; note = 2'-O-methyluridine-3'-phosphate
  modified_base 8: mod_base = OTHER; note = 2'-O-methyladenosine-3'-phosphate
  modified_base 9: mod_base = OTHER; note = 2'-O-methylguanosine-3'-phosphate
  modified_base 10: mod_base = OTHER; note = 2'-fluoroguanosine-3'-phosphate
  modified_base 11: mod_base = OTHER; note = 2'-fluorocytidine-3'-phosphate
  modified_base 12: mod_base = OTHER; note = 2'-fluoroadenosine-3'-phosphate
  modified_base 13: mod_base = OTHER; note = 2'-O-methyluridine-3'-phosphate
  modified_base 14: mod_base = OTHER; note = 2'-O-methyladenosine-3'-phosphate
  modified_base 15: mod_base = OTHER; note = 2'-O-methyladenosine-3'-phosphate
  modified_base 16: mod_base = OTHER; note = 2'-O-methyladenosine-3'-phosphate
  modified_base 17: mod_base = OTHER; note = 2'-O-methyluridine-3'-phosphate
  modified_base 18: mod_base = OTHER; note = 2'-O-methyluridine-3'-phosphate
  modified_base 19: mod_base = OTHER; note = 2'-O-methylguanosine-3'-phosphate
  modified_base 20: mod_base = OTHER; note = 2'-O-methylguanosine-3'-phosphate
  modified_base 21: mod_base = OTHER; note = 2'-O-methyluridine-3'-phosphate
  modified_base 22: mod_base = OTHER; note = 2'-O-methyladenosine-3'-phosphate
  modified_base 23: mod_base = OTHER; note = 2'-O-methyluridine-3'-phosphorothioate
  modified_base 24: mod_base = OTHER; note = 2'-O-methyluridine-3'-phosphate
  modified_base 25: mod_base = OTHER; note = inverted (3'-3' linked) abasic deoxyribonucleotide
  misc_feature 1: note = DNA
  misc_feature 2..24: note = RNA
  misc_feature 25: note = DNA
nggctgtaggcataaattggtattn

SEQ ID NO: 232 - DNA, 25 bp, synthetic construct
  source 1..25: mol_type = other DNA
  modified_base 1: mod_base = OTHER; note 37-(((2R,3R,4R,5R,6R)-3-acetamido-4,5-diacetoxy-6-(acetoxym ethyl)tetrahydro-2H-pyran-2-yl)oxy)-23,28-bis((2-(2-(((2R,3 R,4R,5R,6R)-3-acetamido-4,5-diacetoxy-6-(acetoxymethyl)tetr ahydro-2H-pyran-2-yl)oxy)ethoxy)ethyl)carbamoyl)-21,26,31-t rioxo-3,6,9,12,15,18,35-heptaoxa-22,27,32-triazaheptatriaco ntyl phosphorothioate-inverted (3'-3' linked) abasic deoxyribonucleotide-5'-phosphorothioate
  modified_base 2: mod_base = OTHER; note = 2'-O-methyladenosine-3'-phosphate
  modified_base 3: mod_base = OTHER; note = 2'-O-methyladenosine-3'-phosphate
  modified_base 4: mod_base = OTHER; note = 2'-O-methylcytidine-3'-phosphate
  modified_base 5: mod_base = OTHER; note = 2'-O-methyluridine-3'-phosphate
  modified_base 6: mod_base = OTHER; note = 2'-O-methylguanosine-3'-phosphate
  modified_base 7: mod_base = OTHER; note = 2'-O-methyluridine-3'-phosphate
  modified_base 8: mod_base = OTHER; note = 2'-O-methyladenosine-3'-phosphate
  modified_base 9: mod_base = OTHER; note = 2'-O-methylguanosine-3'-phosphate
  modified_base 10: mod_base = OTHER; note = 2'-fluoroguanosine-3'-phosphate
  modified_base 11: mod_base = OTHER; note = 2'-fluorocytidine-3'-phosphate
  modified_base 12: mod_base = OTHER; note = 2'-fluoroadenosine-3'-phosphate
  modified_base 13: mod_base = OTHER; note = 2'-O-methyluridine-3'-phosphate
  modified_base 14: mod_base = OTHER; note = 2'-O-methyladenosine-3'-phosphate
  modified_base 15: mod_base = OTHER; note = 2'-O-methyladenosine-3'-phosphate
  modified_base 16: mod_base = OTHER; note = 2'-O-methyladenosine-3'-phosphate
  modified_base 17: mod_base = OTHER; note = 2'-O-methyluridine-3'-phosphate
  modified_base 18: mod_base = OTHER; note = 2'-O-methyluridine-3'-phosphate
  modified_base 19: mod_base = OTHER; note = 2'-O-methylguanosine-3'-phosphate
  modified_base 20: mod_base = OTHER; note = 2'-O-methylguanosine-3'-phosphate
  modified_base 21: mod_base = OTHER; note = 2'-O-methyluridine-3'-phosphate
  modified_base 22: mod_base = OTHER; note = 2'-O-methyladenosine-3'-phosphate
  modified_base 23: mod_base = OTHER; note = 2'-O-methyluridine-3'-phosphorothioate
  modified_base 24: mod_base = OTHER; note = 2'-O-methyluridine-3'-phosphate
  modified_base 25: mod_base = OTHER; note = inverted (3'-3' linked) abasic deoxyribonucleotide
  misc_feature 1: note = DNA
  misc_feature 2..24: note = RNA
  misc_feature 25: note = DNA
naactgtaggcataaattggtattn

SEQ ID NO: 233 - DNA, 23 bp, synthetic construct
  source 1..23: mol_type = other DNA
  modified_base 1: mod_base = OTHER; note 37-(((2R,3R,4R,5R,6R)-3-acetamido-4,5-diacetoxy-6-(acetoxym ethyl)tetrahydro-2H-pyran-2-yl)oxy)-23,28-bis((2-(2-(((2R,3 R,4R,5R,6R)-3-acetamido-4,5-diacetoxy-6-(acetoxymethyl)tetr ahydro-2H-pyran-2-yl)oxy)ethoxy)ethyl)carbamoyl)-21,26,31-t rioxo-3,6,9,12,15,18,35-heptaoxa-22,27,32-triazaheptatriaco ntyl phosphorothioate-inverted (3'-3' linked) abasic deoxyribonucleotide
  modified_base 2: mod_base = OTHER; note = 2'-O-methyluridine-3'-phosphate
  modified_base 3: mod_base = OTHER; note = 2'-O-methylguanosine-3'-phosphate
  modified_base 4: mod_base = OTHER; note = 2'-O-methylguanosine-3'-phosphate
  modified_base 5: mod_base = OTHER; note = 2'-O-methyluridine-3'-phosphate
  modified_base 6: mod_base = OTHER; note = 2'-O-methylguanosine-3'-phosphate
  modified_base 7: mod_base = OTHER; note = 2'-O-methylguanosine-3'-phosphate
  modified_base 8: mod_base = OTHER; note = 2'-fluoroadenosine-3'-phosphate
  modified_base 9: mod_base = OTHER; note = 2'-fluorocytidine-3'-phosphate
  modified_base 10: mod_base = OTHER; note = 2'-fluorouridine-3'-phosphate
  modified_base 11: mod_base = OTHER; note = 2'-O-methyluridine-3'-phosphate
  modified_base 12: mod_base = OTHER; note = 2'-O-methylcytidine-3'-phosphate
  modified_base 13: mod_base = OTHER; note = 2'-O-methyluridine-3'-phosphate
  modified_base 14: mod_base = OTHER; note = 2'-O-methylcytidine-3'-phosphate
  modified_base 15: mod_base = OTHER; note = 2'-O-methyluridine-3'-phosphate
  modified_base 16: mod_base = OTHER; note = 2'-O-methylcytidine-3'-phosphate
  modified_base 17: mod_base = OTHER; note = 2'-O-methyladenosine-3'-phosphate
  modified_base 18: mod_base = OTHER; note = 2'-O-methyladenosine-3'-phosphate
  modified_base 19: mod_base = OTHER; note = 2'-O-methyluridine-3'-phosphate
  modified_base 20: mod_base = OTHER; note = 2'-O-methyladenosine-3'-phosphate
  modified_base 21: mod_base = OTHER; note = 2'-O-methyluridine-3'-phosphorothioate
  modified_base 22: mod_base = OTHER; note = 2'-O-methyluridine-3'-phosphate
  modified_base 23: mod_base = OTHER; note = inverted (3'-3' linked) abasic deoxyribonucleotide
  misc_feature 1: note = DNA
  misc_feature 2..22: note = RNA
  misc_feature 23: note = DNA
ntggtggacttctctcaatattn

SEQ ID NO: 234 - DNA, 24 bp, synthetic construct
  source 1..24: mol_type = other DNA
  modified_base 1: mod_base = OTHER; note 37-(((2R,3R,4R,5R,6R)-3-acetamido-4,5-diacetoxy-6-(acetoxym ethyl)tetrahydro-2H-pyran-2-yl)oxy)-23,28-bis((2-(2-(((2R,3 R,4R,5R,6R)-3-acetamido-4,5-diacetoxy-6-(acetoxymethyl)tetr ahydro-2H-pyran-2-yl)oxy)ethoxy)ethyl)carbamoyl)-21,26,31-t rioxo-3,6,9,12,15,18,35-heptaoxa-22,27,32-triazaheptatriaco ntyl phosphorothioate-inverted (3'-3' linked) abasic deoxyribonucleotide-5'-phosphorothioate
  modified_base 2: mod_base = OTHER; note = 2'-O-methylguanosine-3'-phosphate
  modified_base 3: mod_base = OTHER; note = 2'-O-methyluridine-3'-phosphate
  modified_base 4: mod_base = OTHER; note = 2'-O-methylguanosine-3'-phosphate
  modified_base 5: mod_base = OTHER; note = 2'-O-methylguanosine-3'-phosphate
  modified_base 6: mod_base = OTHER; note = 2'-O-methyluridine-3'-phosphate
  modified_base 7: mod_base = OTHER; note = 2'-O-methylguanosine-3'-phosphate
  modified_base 8: mod_base = OTHER; note = 2'-O-methylguanosine-3'-phosphate
  modified_base 9: mod_base = OTHER; note = 2'-fluoroadenosine-3'-phosphate
  modified_base 10: mod_base = OTHER; note = 2'-fluorocytidine-3'-phosphate
  modified_base 11: mod_base = OTHER; note = 2'-fluorouridine-3'-phosphate
  modified_base 12: mod_base = OTHER; note = 2'-O-methyluridine-3'-phosphate
  modified_base 13: mod_base = OTHER; note = 2'-O-methylcytidine-3'-phosphate
  modified_base 14: mod_base = OTHER; note = 2'-O-methyluridine-3'-phosphate
  modified_base 15: mod_base = OTHER; note = 2'-O-methylcytidine-3'-phosphate
  modified_base 16: mod_base = OTHER; note = 2'-O-methyluridine-3'-phosphate
  modified_base 17: mod_base = OTHER; note = 2'-O-methylcytidine-3'-phosphate
  modified_base 18: mod_base = OTHER; note = 2'-O-methyladenosine-3'-phosphate
  modified_base 19: mod_base = OTHER; note = 2'-O-methyladenosine-3'-phosphate
  modified_base 20: mod_base = OTHER; note = 2'-O-methyluridine-3'-phosphate
  modified_base 21: mod_base = OTHER; note = 2'-O-methyladenosine-3'-phosphate
  modified_base 22: mod_base = OTHER; note = 2'-O-methyluridine-3'-phosphorothioate
  modified_base 23: mod_base = OTHER; note = 2'-O-methyluridine-3'-phosphate
  modified_base 24: mod_base = OTHER; note = inverted (3'-3' linked) abasic deoxyribonucleotide
  misc_feature 1: note = DNA
  misc_feature 2..23: note = RNA
  misc_feature 24: note = DNA
ngtggtggacttctctcaatattn

SEQ ID NO: 235 - DNA, 24 bp, synthetic construct
  source 1..24: mol_type = other DNA
  modified_base 1: mod_base = OTHER; note 37-(((2R,3R,4R,5R,6R)-3-acetamido-4,5-diacetoxy-6-(acetoxym ethyl)tetrahydro-2H-pyran-2-yl)oxy)-23,28-bis((2-(2-(((2R,3 R,4R,5R,6R)-3-acetamido-4,5-diacetoxy-6-(acetoxymethyl)tetr ahydro-2H-pyran-2-yl)oxy)ethoxy)ethyl)carbamoyl)-21,26,31-t rioxo-3,6,9,12,15,18,35-heptaoxa-22,27,32-triazaheptatriaco ntyl phosphorothioate-2'-O-methyladenosine-3'-phosphorothioate
  modified_base 2: mod_base = OTHER; note = 2'-O-methyladenosine-3'-phosphate
  modified_base 3: mod_base = OTHER; note = 2'-O-methyluridine-3'-phosphate
  modified_base 4: mod_base = OTHER; note = 2'-O-methylguanosine-3'-phosphate
  modified_base 5: mod_base = OTHER; note = 2'-O-methylguanosine-3'-phosphate
  modified_base 6: mod_base = OTHER; note = 2'-O-methyluridine-3'-phosphate
  modified_base 7: mod_base = OTHER; note = 2'-O-methylguanosine-3'-phosphate
  modified_base 8: mod_base = OTHER; note = 2'-O-methylguanosine-3'-phosphate
  modified_base 9: mod_base = OTHER; note = 2'-fluoroadenosine-3'-phosphate
  modified_base 10: mod_base = OTHER; note = 2'-fluorocytidine-3'-phosphate
  modified_base 11: mod_base = OTHER; note = 2'-fluorouridine-3'-phosphate
  modified_base 12: mod_base = OTHER; note = 2'-O-methyluridine-3'-phosphate
  modified_base 13: mod_base = OTHER; note = 2'-O-methylcytidine-3'-phosphate
  modified_base 14: mod_base = OTHER; note = 2'-O-methyluridine-3'-phosphate
  modified_base 15: mod_base = OTHER; note = 2'-O-methylcytidine-3'-phosphate
  modified_base 16: mod_base = OTHER; note = 2'-O-methyluridine-3'-phosphate
  modified_base 17: mod_base = OTHER; note = 2'-O-methylcytidine-3'-phosphate
  modified_base 18: mod_base = OTHER; note = 2'-O-methyladenosine-3'-phosphate
  modified_base 19: mod_base = OTHER; note = 2'-O-methyladenosine-3'-phosphate
  modified_base 20: mod_base = OTHER; note = 2'-O-methyluridine-3'-phosphate
  modified_base 21: mod_base = OTHER; note = 2'-O-methyladenosine-3'-phosphate
  modified_base 22: mod_base = OTHER; note = 2'-O-methyluridine-3'-phosphorothioate
  modified_base 23: mod_base = OTHER; note = 2'-O-methyluridine-3'-phosphate
  modified_base 24: mod_base = OTHER; note = inverted (3'-3' linked) abasic deoxyribonucleotide
  misc_feature 1..23: note = RNA
  misc_feature 24: note = DNA
aatggtggacttctctcaatattn

SEQ ID NO: 236 - DNA, 24 bp, synthetic construct
  source 1..24: mol_type = other DNA
  modified_base 1: mod_base = OTHER; note 37-(((2R,3R,4R,5R,6R)-3-acetamido-4,5-diacetoxy-6-(acetoxym ethyl)tetrahydro-2H-pyran-2-yl)oxy)-23,28-bis((2-(2-(((2R,3 R,4R,5R,6R)-3-acetamido-4,5-diacetoxy-6-(acetoxymethyl)tetr ahydro-2H-pyran-2-yl)oxy)ethoxy)ethyl)carbamoyl)-21,26,31-t rioxo-3,6,9,12,15,18,35-heptaoxa-22,27,32-triazaheptatriaco ntyl phosphorothioate-2'-O-methylcytidine-3'-phosphorothioate
  modified_base 2: mod_base = OTHER; note = 2'-O-methylguanosine-3'-phosphate
  modified_base 3: mod_base = OTHER; note = 2'-O-methyluridine-3'-phosphate
  modified_base 4: mod_base = OTHER; note = 2'-O-methylguanosine-3'-phosphate
  modified_base 5: mod_base = OTHER; note = 2'-O-methylguanosine-3'-phosphate
  modified_base 6: mod_base = OTHER; note = 2'-O-methyluridine-3'-phosphate
  modified_base 7: mod_base = OTHER; note = 2'-O-methylguanosine-3'-phosphate
  modified_base 8: mod_base = OTHER; note = 2'-O-methylguanosine-3'-phosphate
  modified_base 9: mod_base = OTHER; note = 2'-fluoroadenosine-3'-phosphate
  modified_base 10: mod_base = OTHER; note = 2'-fluorocytidine-3'-phosphate
  modified_base 11: mod_base = OTHER; note = 2'-fluorouridine-3'-phosphate
  modified_base 12: mod_base = OTHER; note = 2'-O-methyluridine-3'-phosphate
  modified_base 13: mod_base = OTHER; note = 2'-O-methylcytidine-3'-phosphate
  modified_base 14: mod_base = OTHER; note = 2'-O-methyluridine-3'-phosphate
  modified_base 15: mod_base = OTHER; note = 2'-O-methylcytidine-3'-phosphate
  modified_base 16: mod_base = OTHER; note = 2'-O-methyluridine-3'-phosphate
  modified_base 17: mod_base = OTHER; note = 2'-O-methylcytidine-3'-phosphate
  modified_base 18: mod_base = OTHER; note = 2'-O-methyladenosine-3'-phosphate
  modified_base 19: mod_base = OTHER; note = 2'-O-methyladenosine-3'-phosphate
  modified_base 20: mod_base = OTHER; note = 2'-O-methyluridine-3'-phosphate
  modified_base 21: mod_base = OTHER; note = 2'-O-methyladenosine-3'-phosphate
  modified_base 22: mod_base = OTHER; note = 2'-O-methyluridine-3'-phosphorothioate
  modified_base 23: mod_base = OTHER; note = 2'-O-methyluridine-3'-phosphate
  modified_base 24: mod_base = OTHER; note = inverted (3'-3' linked) abasic deoxyribonucleotide
  misc_feature 1..23: note = RNA
  misc_feature 24: note = DNA
cgtggtggacttctctcaatattn

SEQ ID NO: 237 - DNA, 22 bp, synthetic construct
  source 1..22: mol_type = other DNA
  modified_base 1: mod_base = OTHER; note (1R,4s)-4-(3-(4-((S)-1,17-bis(((2R,3R,4R,5R,6R)-3-acetamido -4,5-diacetoxy-6-(acetoxymethyl)tetrahydro-2H-pyran-2-yl)ox y)-9-(2-((2-(2-(((2R,3R,4R,5R,6R)-3-acetamido-4,5-diacetoxy -6-(acetoxymethyl)tetrahydro-2H-pyran-2-yl)oxy)ethoxy)ethyl )amino)-2-oxoethyl)-7,11-dioxo-3,15-dioxa-6,9,12-triazahept adecan-8-yl)phenyl)propanoyl)cyclohexyl phosphorothioate-2'-O-methylcytidine-3'-phosphorothioate
  modified_base 2: mod_base = OTHER; note = 2'-O-methylguanosine-3'-phosphate
  modified_base 3: mod_base = OTHER; note = 2'-O-methyluridine-3'-phosphate
  modified_base 4: mod_base = OTHER; note = 2'-O-methylguanosine-3'-phosphate
  modified_base 5: mod_base = OTHER; note = 2'-O-methylguanosine-3'-phosphate
  modified_base 6: mod_base = OTHER; note = 2'-O-methyluridine-3'-phosphate
  modified_base 7: mod_base = OTHER; note = 2'-O-methylguanosine-3'-phosphate
  modified_base 8: mod_base = OTHER; note = 2'-O-methylguanosine-3'-phosphate
  modified_base 9: mod_base = OTHER; note = 2'-fluoroadenosine-3'-phosphate
  modified_base 10: mod_base = OTHER; note = 2'-fluorocytidine-3'-phosphate
  modified_base 11: mod_base = OTHER; note = 2'-fluorouridine-3'-phosphate
  modified_base 12: mod_base = OTHER; note = 2'-O-methyluridine-3'-phosphate
  modified_base 13: mod_base = OTHER; note = 2'-O-methylcytidine-3'-phosphate
  modified_base 14: mod_base = OTHER; note = 2'-O-methyluridine-3'-phosphate
  modified_base 15: mod_base = OTHER; note = 2'-O-methylcytidine-3'-phosphate
  modified_base 16: mod_base = OTHER; note = 2'-O-methyluridine-3'-phosphate
  modified_base 17: mod_base = OTHER; note = 2'-O-methylcytidine-3'-phosphate
  modified_base 18: mod_base = OTHER; note = 2'-O-methyladenosine-3'-phosphate
  modified_base 19: mod_base = OTHER; note = 2'-O-methyladenosine-3'-phosphate
  modified_base 20: mod_base = OTHER; note = 2'-O-methyluridine-3'-phosphate
  modified_base 21: mod_base = OTHER; note = 2'-O-methyladenosine-3'-phosphorothioate
  modified_base 22: mod_base = OTHER; note = inverted (3'-3' linked) abasic deoxyribonucleotide
  misc_feature 1..21: note = RNA
  misc_feature 22: note = DNA
cgtggtggacttctctcaatan

SEQ ID NO: 238 - DNA, 23 bp, synthetic construct
  source 1..23: mol_type = other DNA
  modified_base 1: mod_base = OTHER; note 37-(((2R,3R,4R,5R,6R)-3-acetamido-4,5-diacetoxy-6-(acetoxym ethyl)tetrahydro-2H-pyran-2-yl)oxy)-23,28-bis((2-(2-(((2R,3 R,4R,5R,6R)-3-acetamido-4,5-diacetoxy-6-(acetoxymethyl)tetr ahydro-2H-pyran-2-yl)oxy)ethoxy)ethyl)carbamoyl)-21,26,31-t rioxo-3,6,9,12,15,18,35-heptaoxa-22,27,32-triazaheptatriaco ntyl phosphorothioate-inverted (3'-3' linked) abasic deoxyribonucleotide-5'-phosphorothioate
  modified_base 2: mod_base = OTHER; note = 2'-O-methyladenosine-3'-phosphate
  modified_base 3: mod_base = OTHER; note = 2'-O-methyladenosine-3'-phosphate
  modified_base 4: mod_base = OTHER; note = 2'-O-methylguanosine-3'-phosphate
  modified_base 5: mod_base = OTHER; note = 2'-O-methyluridine-3'-phosphate
  modified_base 6: mod_base = OTHER; note = 2'-O-methylguanosine-3'-phosphate
  modified_base 7: mod_base = OTHER; note = 2'-O-methylguanosine-3'-phosphate
  modified_base 8: mod_base = OTHER; note = 2'-O-methyluridine-3'-phosphate
  modified_base 9: mod_base = OTHER; note = 2'-O-methylguanosine-3'-phosphate
  modified_base 10: mod_base = OTHER; note = 2'-fluoroguanosine-3'-phosphate
  modified_base 11: mod_base = OTHER; note = 2'-fluoroadenosine-3'-phosphate
  modified_base 12: mod_base = OTHER; note = 2'-fluorocytidine-3'-phosphate
  modified_base 13: mod_base = OTHER; note = 2'-O-methyluridine-3'-phosphate
  modified_base 14: mod_base = OTHER; note = 2'-O-methyluridine-3'-phosphate
  modified_base 15: mod_base = OTHER; note = 2'-O-methylcytidine-3'-phosphate
  modified_base 16: mod_base = OTHER; note = 2'-O-methyluridine-3'-phosphate
  modified_base 17: mod_base = OTHER; note = 2'-O-methylcytidine-3'-phosphate
  modified_base 18: mod_base = OTHER; note = 2'-O-methyluridine-3'-phosphate
  modified_base 19: mod_base = OTHER; note = 2'-O-methylcytidine-3'-phosphate
  modified_base 20: mod_base = OTHER; note = 2'-O-methyladenosine-3'-phosphate
  modified_base 21: mod_base = OTHER; note = 2'-O-methyladenosine-3'-phosphate
  modified_base 22: mod_base = OTHER; note = 2'-O-methyluridine-3'-phosphorothioate
  modified_base 23: mod_base = OTHER; note = inverted (3'-3' linked) abasic deoxyribonucleotide
  misc_feature 1: note = DNA
  misc_feature 2..22: note = RNA
  misc_feature 23: note = DNA
naagtggtggacttctctcaatn

SEQ ID NO: 239 - DNA, 23 bp, synthetic construct
  source 1..23: mol_type = other DNA
  modified_base 1: mod_base = OTHER; note 37-(((2R,3R,4R,5R,6R)-3-acetamido-4,5-diacetoxy-6-(acetoxym ethyl)tetrahydro-2H-pyran-2-yl)oxy)-23,28-bis((2-(2-(((2R,3 R,4R,5R,6R)-3-acetamido-4,5-diacetoxy-6-(acetoxymethyl)tetr ahydro-2H-pyran-2-yl)oxy)ethoxy)ethyl)carbamoyl)-21,26,31-t rioxo-3,6,9,12,15,18,35-heptaoxa-22,27,32-triazaheptatriaco ntyl phosphorothioate-inverted (3'-3' linked) abasic deoxyribonucleotide-5'-phosphorothioate
  modified_base 2: mod_base = OTHER; note = 2'-O-methylguanosine-3'-phosphate
  modified_base 3: mod_base = OTHER; note = 2'-O-methyluridine-3'-phosphate
  modified_base 4: mod_base = OTHER; note = 2'-O-methylguanosine-3'-phosphate
  modified_base 5: mod_base = OTHER; note = 2'-O-methylguanosine-3'-phosphate
  modified_base 6: mod_base = OTHER; note = 2'-O-methyluridine-3'-phosphate
  modified_base 7: mod_base = OTHER; note = 2'-O-methylguanosine-3'-phosphate
  modified_base 8: mod_base = OTHER; note = 2'-fluoroguanosine-3'-phosphate
  modified_base 9: mod_base = OTHER; note = 2'-fluoroadenosine-3'-phosphate
  modified_base 10: mod_base = OTHER; note = 2'-fluorocytidine-3'-phosphate
  modified_base 11: mod_base = OTHER; note = 2'-O-methyluridine-3'-phosphate
  modified_base 12: mod_base = OTHER; note = 2'-O-methyluridine-3'-phosphate
  modified_base 13: mod_base = OTHER; note = 2'-O-methylcytidine-3'-phosphate
  modified_base 14: mod_base = OTHER; note = 2'-O-methyluridine-3'-phosphate
  modified_base 15: mod_base = OTHER; note = 2'-O-methylcytidine-3'-phosphate
  modified_base 16: mod_base = OTHER; note = 2'-O-methyluridine-3'-phosphate
  modified_base 17: mod_base = OTHER; note = 2'-O-methylcytidine-3'-phosphate
  modified_base 18: mod_base = OTHER; note = 2'-O-methyladenosine-3'-phosphate
  modified_base 19: mod_base = OTHER; note = 2'-O-methyladenosine-3'-phosphate
  modified_base 20: mod_base = OTHER; note = 2'-O-methyladenosine-3'-phosphate
  modified_base 21: mod_base = OTHER; note = 2'-O-methyluridine-3'-phosphorothioate
  modified_base 22: mod_base = OTHER; note = 2'-O-methyluridine-3'-phosphate
  modified_base 23: mod_base = OTHER; note = inverted (3'-3' linked) abasic deoxyribonucleotide
  misc_feature 1: note = DNA
  misc_feature 2..22: note = RNA
  misc_feature 23: note = DNA
ngtggtggacttctctcaaattn

SEQ ID NO: 240 - DNA, 24 bp, synthetic construct
  source 1..24: mol_type = other DNA
  modified_base 1: mod_base = OTHER; note 37-(((2R,3R,4R,5R,6R)-3-acetamido-4,5-diacetoxy-6-(acetoxym ethyl)tetrahydro-2H-pyran-2-yl)oxy)-23,28-bis((2-(2-(((2R,3 R,4R,5R,6R)-3-acetamido-4,5-diacetoxy-6-(acetoxymethyl)tetr ahydro-2H-pyran-2-yl)oxy)ethoxy)ethyl)carbamoyl)-21,26,31-t rioxo-3,6,9,12,15,18,35-heptaoxa-22,27,32-triazaheptatriaco ntyl phosphorothioate-inverted (3'-3' linked) abasic deoxyribonucleotide-5'-phosphorothioate
  modified_base 2: mod_base = OTHER; note = 2'-O-methylcytidine-3'-phosphate
  modified_base 3: mod_base = OTHER; note = 2'-O-methylguanosine-3'-phosphate
  modified_base 4: mod_base = OTHER; note = 2'-O-methyluridine-3'-phosphate
  modified_base 5: mod_base = OTHER; note = 2'-O-methylguanosine-3'-phosphate
  modified_base 6: mod_base = OTHER; note = 2'-O-methylguanosine-3'-phosphate
  modified_base 7: mod_base = OTHER; note = 2'-O-methyluridine-3'-phosphate
  modified_base 8: mod_base = OTHER; note = 2'-O-methylguanosine-3'-phosphate
  modified_base 9: mod_base = OTHER; note = 2'-fluoroguanosine-3'-phosphate
  modified_base 10: mod_base = OTHER; note = 2'-fluoroadenosine-3'-phosphate
  modified_base 11: mod_base = OTHER; note = 2'-fluorocytidine-3'-phosphate
  modified_base 12: mod_base = OTHER; note = 2'-O-methyluridine-3'-phosphate
  modified_base 13: mod_base = OTHER; note = 2'-O-methyluridine-3'-phosphate
  modified_base 14: mod_base = OTHER; note = 2'-O-methylcytidine-3'-phosphate
  modified_base 15: mod_base = OTHER; note = 2'-O-methyluridine-3'-phosphate
  modified_base 16: mod_base = OTHER; note = 2'-O-methylcytidine-3'-phosphate
  modified_base 17: mod_base = OTHER; note = 2'-O-methyluridine-3'-phosphate
  modified_base 18: mod_base = OTHER; note = 2'-O-methylcytidine-3'-phosphate
  modified_base 19: mod_base = OTHER; note = 2'-O-methyladenosine-3'-phosphate
  modified_base 20: mod_base = OTHER; note = 2'-O-methyladenosine-3'-phosphate
  modified_base 21: mod_base = OTHER; note = 2'-O-methyladenosine-3'-phosphate
  modified_base 22: mod_base = OTHER; note = 2'-O-methyluridine-3'-phosphorothioate
  modified_base 23: mod_base = OTHER; note = 2'-O-methyluridine-3'-phosphate
  modified_base 24: mod_base = OTHER; note = inverted (3'-3' linked) abasic deoxyribonucleotide
  misc_feature 1: note = DNA
  misc_feature 2..23: note = RNA
  misc_feature 24: note = DNA
ncgtggtggacttctctcaaattn

SEQ ID NO: 241 - DNA, 24 bp, synthetic construct
  source 1..24: mol_type = other DNA
  modified_base 1: mod_base = OTHER; note 37-(((2R,3R,4R,5R,6R)-3-acetamido-4,5-diacetoxy-6-(acetoxym ethyl)tetrahydro-2H-pyran-2-yl)oxy)-23,28-bis((2-(2-(((2R,3 R,4R,5R,6R)-3-acetamido-4,5-diacetoxy-6-(acetoxymethyl)tetr ahydro-2H-pyran-2-yl)oxy)ethoxy)ethyl)carbamoyl)-21,26,31-t rioxo-3,6,9,12,15,18,35-heptaoxa-22,27,32-triazaheptatriaco ntyl phosphorothioate-2'-O-methyladenosine-3'-phosphorothioate
  modified_base 2: mod_base = OTHER; note = 2'-O-methyladenosine-3'-phosphate
  modified_base 3: mod_base = OTHER; note = 2'-O-methylguanosine-3'-phosphate
  modified_base 4: mod_base = OTHER; note = 2'-O-methyluridine-3'-phosphate
  modified_base 5: mod_base = OTHER; note = 2'-O-methylguanosine-3'-phosphate
  modified_base 6: mod_base = OTHER; note = 2'-O-methylguanosine-3'-phosphate
  modified_base 7: mod_base = OTHER; note = 2'-O-methyluridine-3'-phosphate
  modified_base 8: mod_base = OTHER; note = 2'-O-methylguanosine-3'-phosphate
  modified_base 9: mod_base = OTHER; note = 2'-fluoroguanosine-3'-phosphate
  modified_base 10: mod_base = OTHER; note = 2'-fluoroadenosine-3'-phosphate
  modified_base 11: mod_base = OTHER; note = 2'-fluorocytidine-3'-phosphate
  modified_base 12: mod_base = OTHER; note = 2'-O-methyluridine-3'-phosphate
  modified_base 13: mod_base = OTHER; note = 2'-O-methyluridine-3'-phosphate
  modified_base 14: mod_base = OTHER; note = 2'-O-methylcytidine-3'-phosphate
  modified_base 15: mod_base = OTHER; note = 2'-O-methyluridine-3'-phosphate
  modified_base 16: mod_base = OTHER; note = 2'-O-methylcytidine-3'-phosphate
  modified_base 17: mod_base = OTHER; note = 2'-O-methyluridine-3'-phosphate
  modified_base 18: mod_base = OTHER; note = 2'-O-methylcytidine-3'-phosphate
  modified_base 19: mod_base = OTHER; note = 2'-O-methyladenosine-3'-phosphate
  modified_base 20: mod_base = OTHER; note = 2'-O-methyladenosine-3'-phosphate
  modified_base 21: mod_base = OTHER; note = 2'-O-methyladenosine-3'-phosphate
  modified_base 22: mod_base = OTHER; note = 2'-O-methyluridine-3'-phosphorothioate
  modified_base 23: mod_base = OTHER; note = 2'-O-methyluridine-3'-phosphate
  modified_base 24: mod_base = OTHER; note = inverted (3'-3' linked) abasic deoxyribonucleotide
  misc_feature 1..23: note = RNA
  misc_feature 24: note = DNA
aagtggtggacttctctcaaattn

SEQ ID NO: 242 - DNA, 24 bp, synthetic construct
  source 1..24: mol_type = other DNA
  modified_base 1: mod_base = OTHER; note 37-(((2R,3R,4R,5R,6R)-3-acetamido-4,5-diacetoxy-6-(acetoxym ethyl)tetrahydro-2H-pyran-2-yl)oxy)-23,28-bis((2-(2-(((2R,3 R,4R,5R,6R)-3-acetamido-4,5-diacetoxy-6-(acetoxymethyl)tetr ahydro-2H-pyran-2-yl)oxy)ethoxy)ethyl)carbamoyl)-21,26,31-t rioxo-3,6,9,12,15,18,35-heptaoxa-22,27,32-triazaheptatriaco ntyl phosphorothioate-2'-O-methyluridine-3'-phosphorothioate
  modified_base 2: mod_base = OTHER; note = 2'-O-methylcytidine-3'-phosphate
  modified_base 3: mod_base = OTHER; note = 2'-O-methylguanosine-3'-phosphate
  modified_base 4: mod_base = OTHER; note = 2'-O-methyluridine-3'-phosphate
  modified_base 5: mod_base = OTHER; note = 2'-O-methylguanosine-3'-phosphate
  modified_base 6: mod_base = OTHER; note = 2'-O-methylguanosine-3'-phosphate
  modified_base 7: mod_base = OTHER; note = 2'-O-methyluridine-3'-phosphate
  modified_base 8: mod_base = OTHER; note = 2'-O-methylguanosine-3'-phosphate
  modified_base 9: mod_base = OTHER; note = 2'-fluoroguanosine-3'-phosphate
  modified_base 10: mod_base = OTHER; note = 2'-fluoroadenosine-3'-phosphate
  modified_base 11: mod_base = OTHER; note = 2'-fluorocytidine-3'-phosphate
  modified_base 12: mod_base = OTHER; note = 2'-O-methyluridine-3'-phosphate
  modified_base 13: mod_base = OTHER; note = 2'-O-methyluridine-3'-phosphate
  modified_base 14: mod_base = OTHER; note = 2'-O-methylcytidine-3'-phosphate
  modified_base 15: mod_base = OTHER; note = 2'-O-methyluridine-3'-phosphate
  modified_base 16: mod_base = OTHER; note = 2'-O-methylcytidine-3'-phosphate
  modified_base 17: mod_base = OTHER; note = 2'-O-methyluridine-3'-phosphate
  modified_base 18: mod_base = OTHER; note = 2'-O-methylcytidine-3'-phosphate
  modified_base 19: mod_base = OTHER; note = 2'-O-methyladenosine-3'-phosphate
  modified_base 20: mod_base = OTHER; note = 2'-O-methyladenosine-3'-phosphate
  modified_base 21: mod_base = OTHER; note = 2'-O-methyladenosine-3'-phosphate
  modified_base 22: mod_base = OTHER; note = 2'-O-methyluridine-3'-phosphorothioate
  modified_base 23: mod_base = OTHER; note = 2'-O-methyluridine-3'-phosphate
  modified_base 24: mod_base = OTHER; note = inverted (3'-3' linked) abasic deoxyribonucleotide
  misc_feature 1..23: note = RNA
  misc_feature 24: note = DNA
tcgtggtggacttctctcaaattn

SEQ ID NO: 243 - DNA, 24 bp, synthetic construct
  source 1..24: mol_type = other DNA
  modified_base 1: mod_base = OTHER; note 4-((1,22-bis(((2R,3R,4R,5R,6R)-3-acetamido-4,5-diacetoxy-6- (acetoxymethyl)tetrahydro-2H-pyran-2-yl)oxy)-10-((2-(2-(((2 R,3R,4R,5R,6R)-3-acetamido-4,5-diacetoxy-6-(acetoxymethyl)t etrahydro-2H-pyran-2-yl)oxy)ethoxy)ethyl)carbamoyl)-7,12,16 -trioxo-3,20-dioxa-6,11,17-triazadocosan-15-yl)carbamoyl)cy clohexyl phosphorothioate-inverted (3'-3' linked) abasic deoxyribonucleotide-5'-phosphorothioate
  modified_base 2: mod_base = OTHER; note = 2'-O-methylguanosine-3'-phosphate
  modified_base 3: mod_base = OTHER; note = 2'-O-methyluridine-3'-phosphate
  modified_base 4: mod_base = OTHER; note = 2'-O-methylguanosine-3'-phosphate
  modified_base 5: mod_base = OTHER; note = 2'-O-methylguanosine-3'-phosphate
  modified_base 6: mod_base = OTHER; note = 2'-O-methyluridine-3'-phosphate
  modified_base 7: mod_base = OTHER; note = 2'-O-methylguanosine-3'-phosphate
  modified_base 8: mod_base = OTHER; note = 2'-O-methylguanosine-3'-phosphate
  modified_base 9: mod_base = OTHER; note = 2'-fluoroadenosine-3'-phosphate
  modified_base 10: mod_base = OTHER; note = 2'-fluorocytidine-3'-phosphate
  modified_base 11: mod_base = OTHER; note = 2'-fluorouridine-3'-phosphate
  modified_base 12: mod_base = OTHER; note = 2'-O-methyluridine-3'-phosphate
  modified_base 13: mod_base = OTHER; note = 2'-O-methylcytidine-3'-phosphate
  modified_base 14: mod_base = OTHER; note = 2'-O-methyluridine-3'-phosphate
  modified_base 15: mod_base = OTHER; note = 2'-O-methylcytidine-3'-phosphate
  modified_base 16: mod_base = OTHER; note = 2'-O-methyluridine-3'-phosphate
  modified_base 17: mod_base = OTHER; note = 2'-O-methylcytidine-3'-phosphate
  modified_base 18: mod_base = OTHER; note = 2'-O-methyladenosine-3'-phosphate
  modified_base 19: mod_base = OTHER; note = 2'-O-methyladenosine-3'-phosphate
  modified_base 20: mod_base = OTHER; note = 2'-O-methyluridine-3'-phosphate
  modified_base 21: mod_base = OTHER; note = 2'-O-methyladenosine-3'-phosphate
  modified_base 22: mod_base = OTHER; note = 2'-O-methyluridine-3'-phosphorothioate
  modified_base 23: mod_base = OTHER; note = 2'-O-methyluridine-3'-phosphate
  modified_base 24: mod_base = OTHER; note = inverted (3'-3' linked) abasic deoxyribonucleotide
  misc_feature 1: note = DNA
  misc_feature 2..23: note = RNA
  misc_feature 24: note = DNA
ngtggtggacttctctcaatattn

SEQ ID NO: 244 - DNA, 25 bp, synthetic construct
  source 1..25: mol_type = other DNA
  modified_base 1: mod_base = OTHER; note 4-((1,22-bis(((2R,3R,4R,5R,6R)-3-acetamido-4,5-diacetoxy-6- (acetoxymethyl)tetrahydro-2H-pyran-2-yl)oxy)-10-((2-(2-(((2 R,3R,4R,5R,6R)-3-acetamido-4,5-diacetoxy-6-(acetoxymethyl)t etrahydro-2H-pyran-2-yl)oxy)ethoxy)ethyl)carbamoyl)-7,12,16 -trioxo-3,20-dioxa-6,11,17-triazadocosan-15-yl)carbamoyl)cy clohexyl phosphorothioate-inverted (3'-3' linked) abasic deoxyribonucleotide-5'-phosphorothioate
  modified_base 2: mod_base = OTHER; note = 2'-O-methylcytidine-3'-phosphate
  modified_base 3: mod_base = OTHER; note = 2'-O-methylguanosine-3'-phosphate
  modified_base 4: mod_base = OTHER; note = 2'-O-methyluridine-3'-phosphate
  modified_base 5: mod_base = OTHER; note = 2'-O-methylguanosine-3'-phosphate
  modified_base 6: mod_base = OTHER; note = 2'-O-methylguanosine-3'-phosphate
  modified_base 7: mod_base = OTHER; note = 2'-O-methyluridine-3'-phosphate
  modified_base 8: mod_base = OTHER; note = 2'-O-methylguanosine-3'-phosphate
  modified_base 9: mod_base = OTHER; note = 2'-O-methylguanosine-3'-phosphate
  modified_base 10: mod_base = OTHER; note = 2'-fluoroadenosine-3'-phosphate
  modified_base 11: mod_base = OTHER; note = 2'-fluorocytidine-3'-phosphate
  modified_base 12: mod_base = OTHER; note = 2'-fluorouridine-3'-phosphate
  modified_base 13: mod_base = OTHER; note = 2'-O-methyluridine-3'-phosphate
  modified_base 14: mod_base = OTHER; note = 2'-O-methylcytidine-3'-phosphate
  modified_base 15: mod_base = OTHER; note = 2'-O-methyluridine-3'-phosphate
  modified_base 16: mod_base = OTHER; note = 2'-O-methylcytidine-3'-phosphate
  modified_base 17: mod_base = OTHER; note = 2'-O-methyluridine-3'-phosphate
  modified_base 18: mod_base = OTHER; note = 2'-O-methylcytidine-3'-phosphate
  modified_base 19: mod_base = OTHER; note = 2'-O-methyladenosine-3'-phosphate
  modified_base 20: mod_base = OTHER; note = 2'-O-methyladenosine-3'-phosphate
  modified_base 21: mod_base = OTHER; note = 2'-O-methyluridine-3'-phosphate
  modified_base 22: mod_base = OTHER; note = 2'-O-methyladenosine-3'-phosphate
  modified_base 23: mod_base = OTHER; note = 2'-O-methyluridine-3'-phosphorothioate
  modified_base 24: mod_base = OTHER; note = 2'-O-methyluridine-3'-phosphate
  modified_base 25: mod_base = OTHER; note = inverted (3'-3' linked) abasic deoxyribonucleotide
  misc_feature 1: note = DNA
  misc_feature 2..24: note = RNA
  misc_feature 25: note = DNA
ncgtggtggacttctctcaatattn

SEQ ID NO: 245 - DNA, 25 bp, synthetic construct
  source 1..25: mol_type = other DNA
  modified_base 1: mod_base = OTHER; note 4-((1,22-bis(((2R,3R,4R,5R,6R)-3-acetamido-4,5-diacetoxy-6- (acetoxymethyl)tetrahydro-2H-pyran-2-yl)oxy)-10-((2-(2-(((2 R,3R,4R,5R,6R)-3-acetamido-4,5-diacetoxy-6-(acetoxymethyl)t etrahydro-2H-pyran-2-yl)oxy)ethoxy)ethyl)carbamoyl)-7,12,16 -trioxo-3,20-dioxa-6,11,17-triazadocosan-15-yl)carbamoyl)cy clohexyl phosphorothioate-inverted (3'-3' linked) abasic deoxyribonucleotide-5'-phosphorothioate
  modified_base 2: mod_base = OTHER; note = 2'-O-methylcytidine-3'-phosphate
  modified_base 3: mod_base = OTHER; note = 2'-O-methyluridine-3'-phosphate
  modified_base 4: mod_base = OTHER; note = 2'-O-methylcytidine-3'-phosphate
  modified_base 5: mod_base = OTHER; note = 2'-O-methylguanosine-3'-phosphate
  modified_base 6: mod_base = OTHER; note = 2'-O-methyluridine-3'-phosphate
  modified_base 7: mod_base = OTHER; note = 2'-O-methylguanosine-3'-phosphate
  modified_base 8: mod_base = OTHER; note = 2'-O-methylguanosine-3'-phosphate
  modified_base 9: mod_base = OTHER; note = 2'-O-methyluridine-3'-phosphate
  modified_base 10: mod_base = OTHER; note = 2'-O-methylguanosine-3'-phosphate
  modified_base 11: mod_base = OTHER; note = 2'-O-methylguanosine-3'-phosphate
  modified_base 12: mod_base = OTHER; note = 2'-fluoroadenosine-3'-phosphate
  modified_base 13: mod_base = OTHER; note = 2'-fluorocytidine-3'-phosphate
  modified_base 14: mod_base = OTHER; note = 2'-fluorouridine-3'-phosphate
  modified_base 15: mod_base = OTHER; note = 2'-O-methyluridine-3'-phosphate
  modified_base 16: mod_base = OTHER; note = 2'-O-methylcytidine-3'-phosphate
  modified_base 17: mod_base = OTHER; note = 2'-O-methyluridine-3'-phosphate
  modified_base 18: mod_base = OTHER; note = 2'-O-methylcytidine-3'-phosphate
  modified_base 19: mod_base = OTHER; note = 2'-O-methyluridine-3'-phosphate
  modified_base 20: mod_base = OTHER; note = 2'-O-methylcytidine-3'-phosphate
  modified_base 21: mod_base = OTHER; note = 2'-O-methyladenosine-3'-phosphate
  modified_base 22: mod_base = OTHER; note = 2'-O-methyladenosine-3'-phosphate
  modified_base 23: mod_base = OTHER; note = 2'-O-methyluridine-3'-phosphate
  modified_base 24: mod_base = OTHER; note = 2'-O-methyladenosine-3'-phosphorothioate
  modified_base 25: mod_base = OTHER; note = inverted (3'-3' linked) abasic deoxyribonucleotide
  misc_feature 1: note = DNA
  misc_feature 2..24: note = RNA
  misc_feature 25: note = DNA
nctcgtggtggacttctctcaatan

SEQ ID NO: 246 - DNA, 27 bp, synthetic construct
  source 1..27: mol_type = other DNA
  modified_base 1: mod_base = OTHER; note 4-((1,22-bis(((2R,3R,4R,5R,6R)-3-acetamido-4,5-diacetoxy-6- (acetoxymethyl)tetrahydro-2H-pyran-2-yl)oxy)-10-((2-(2-(((2 R,3R,4R,5R,6R)-3-acetamido-4,5-diacetoxy-6-(acetoxymethyl)t etrahydro-2H-pyran-2-yl)oxy)ethoxy)ethyl)carbamoyl)-7,12,16 -trioxo-3,20-dioxa-6,11,17-triazadocosan-15-yl)carbamoyl)cy clohexyl phosphorothioate-inverted (3'-3' linked) abasic deoxyribonucleotide-5'-phosphorothioate
  modified_base 2: mod_base = OTHER; note = 2'-O-methylcytidine-3'-phosphate
  modified_base 3: mod_base = OTHER; note = 2'-O-methyluridine-3'-phosphate
  modified_base 4: mod_base = OTHER; note = 2'-O-methylcytidine-3'-phosphate
  modified_base 5: mod_base = OTHER; note = 2'-O-methylguanosine-3'-phosphate
  modified_base 6: mod_base = OTHER; note = 2'-O-methyluridine-3'-phosphate
  modified_base 7: mod_base = OTHER; note = 2'-O-methylguanosine-3'-phosphate
  modified_base 8: mod_base = OTHER; note = 2'-O-methylguanosine-3'-phosphate
  modified_base 9: mod_base = OTHER; note = 2'-O-methyluridine-3'-phosphate
  modified_base 10: mod_base = OTHER; note = 2'-O-methylguanosine-3'-phosphate
  modified_base 11: mod_base = OTHER; note = 2'-O-methylguanosine-3'-phosphate
  modified_base 12: mod_base = OTHER; note = 2'-fluoroadenosine-3'-phosphate
  modified_base 13: mod_base = OTHER; note = 2'-fluorocytidine-3'-phosphate
  modified_base 14: mod_base = OTHER; note = 2'-fluorouridine-3'-phosphate
  modified_base 15: mod_base = OTHER; note = 2'-O-methyluridine-3'-phosphate
  modified_base 16: mod_base = OTHER; note = 2'-O-methylcytidine-3'-phosphate
  modified_base 17: mod_base = OTHER; note = 2'-O-methyluridine-3'-phosphate
  modified_base 18: mod_base = OTHER; note = 2'-O-methylcytidine-3'-phosphate
  modified_base 19: mod_base = OTHER; note = 2'-O-methyluridine-3'-phosphate
  modified_base 20: mod_base = OTHER; note = 2'-O-methylcytidine-3'-phosphate
  modified_base 21: mod_base = OTHER; note = 2'-O-methyladenosine-3'-phosphate
  modified_base 22: mod_base = OTHER; note = 2'-O-methyladenosine-3'-phosphate
  modified_base 23: mod_base = OTHER; note = 2'-O-methyluridine-3'-phosphate
  modified_base 24: mod_base = OTHER; note = 2'-O-methyladenosine-3'-phosphate
  modified_base 25: mod_base = OTHER; note = 2'-O-methyluridine-3'-phosphorothioate
  modified_base 26: mod_base = OTHER; note = 2'-O-methyluridine-3'-phosphate
  modified_base 27: mod_base = OTHER; note = inverted (3'-3' linked) abasic deoxyribonucleotide
  misc_feature 1: note = DNA
  misc_feature 2..26: note = RNA
  misc_feature 27: note = DNA
nctcgtggtggacttctctcaatattn

SEQ ID NO: 247 - DNA, 23 bp, synthetic construct
  source 1..23: mol_type = other DNA
  modified_base 1: mod_base = OTHER; note 4-((1,22-bis(((2R,3R,4R,5R,6R)-3-acetamido-4,5-diacetoxy-6- (acetoxymethyl)tetrahydro-2H-pyran-2-yl)oxy)-10-((2-(2-(((2 R,3R,4R,5R,6R)-3-acetamido-4,5-diacetoxy-6-(acetoxymethyl)t etrahydro-2H-pyran-2-yl)oxy)ethoxy)ethyl)carbamoyl)-7,12,16 -trioxo-3,20-dioxa-6,11,17-triazadocosan-15-yl)carbamoyl)cy clohexyl phosphorothioate-inverted (3'-3' linked) abasic deoxyribonucleotide-5'-phosphorothioate
  modified_base 2: mod_base = OTHER; note = 2'-O-methylguanosine-3'-phosphate
  modified_base 3: mod_base = OTHER; note = 2'-O-methylguanosine-3'-phosphate
  modified_base 4: mod_base = OTHER; note = 2'-O-methylcytidine-3'-phosphate
  modified_base 5: mod_base = OTHER; note = 2'-O-methyluridine-3'-phosphate
  modified_base 6: mod_base = OTHER; note = 2'-O-methylguanosine-3'-phosphate
  modified_base 7: mod_base = OTHER; note = 2'-O-methyluridine-3'-phosphate
  modified_base 8: mod_base = OTHER; note = 2'-O-methyladenosine-3'-phosphate
  modified_base 9: mod_base = OTHER; note = 2'-O-methylguanosine-3'-phosphate
  modified_base 10: mod_base = OTHER; note = 2'-fluoroguanosine-3'-phosphate
  modified_base 11: mod_base = OTHER; note = 2'-fluorocytidine-3'-phosphate
  modified_base 12: mod_base = OTHER; note = 2'-fluoroadenosine-3'-phosphate
  modified_base 13: mod_base = OTHER; note = 2'-O-methyluridine-3'-phosphate
  modified_base 14: mod_base = OTHER; note = 2'-O-methyladenosine-3'-phosphate
  modified_base 15: mod_base = OTHER; note = 2'-O-methyladenosine-3'-phosphate
  modified_base 16: mod_base = OTHER; note = 2'-O-methyladenosine-3'-phosphate
  modified_base 17: mod_base = OTHER; note = 2'-O-methyluridine-3'-phosphate
  modified_base 18: mod_base = OTHER; note = 2'-O-methyluridine-3'-phosphate
  modified_base 19: mod_base = OTHER; note = 2'-O-methylguanosine-3'-phosphate
  modified_base 20: mod_base = OTHER; note = 2'-O-methylguanosine-3'-phosphate
  modified_base 21: mod_base = OTHER; note = 2'-O-methyluridine-3'-phosphate
  modified_base 22: mod_base = OTHER; note = 2'-O-methyladenosine-3'-phosphorothioate
  modified_base 23: mod_base = OTHER; note = inverted (3'-3' linked) abasic deoxyribonucleotide
  misc_feature 1: note = DNA
  misc_feature 2..22: note = RNA
  misc_feature 23: note = DNA
nggctgtaggcataaattggtan

SEQ ID NO: 248 - DNA, 25 bp, synthetic construct
  source 1..25: mol_type = other DNA
  modified_base 1: mod_base = OTHER; note 4-((1,22-bis(((2R,3R,4R,5R,6R)-3-acetamido-4,5-diacetoxy-6- (acetoxymethyl)tetrahydro-2H-pyran-2-yl)oxy)-10-((2-(2-(((2 R,3R,4R,5R,6R)-3-acetamido-4,5-diacetoxy-6-(acetoxymethyl)t etrahydro-2H-pyran-2-yl)oxy)ethoxy)ethyl)carbamoyl)-7,12,16 -trioxo-3,20-dioxa-6,11,17-triazadocosan-15-yl)carbamoyl)cy clohexyl phosphorothioate-inverted (3'-3' linked) abasic deoxyribonucleotide-5'-phosphorothioate
  modified_base 2: mod_base = OTHER; note = 2'-O-methylguanosine-3'-phosphate
  modified_base 3: mod_base = OTHER; note = 2'-O-methyladenosine-3'-phosphate
  modified_base 4: mod_base = OTHER; note = 2'-O-methylguanosine-3'-phosphate
  modified_base 5: mod_base = OTHER; note = 2'-O-methylguanosine-3'-phosphate
  modified_base 6: mod_base = OTHER; note = 2'-O-methylcytidine-3'-phosphate
  modified_base 7: mod_base = OTHER; note = 2'-O-methyluridine-3'-phosphate
  modified_base 8: mod_base = OTHER; note = 2'-O-methylguanosine-3'-phosphate
  modified_base 9: mod_base = OTHER; note = 2'-O-methyluridine-3'-phosphate
  modified_base 10: mod_base = OTHER; note = 2'-O-methyladenosine-3'-phosphate
  modified_base 11: mod_base = OTHER; note = 2'-O-methylguanosine-3'-phosphate
  modified_base 12: mod_base = OTHER; note = 2'-fluoroguanosine-3'-phosphate
  modified_base 13: mod_base = OTHER; note = 2'-fluorocytidine-3'-phosphate
  modified_base 14: mod_base = OTHER; note = 2'-fluoroadenosine-3'-phosphate
  modified_base 15: mod_base = OTHER; note = 2'-O-methyluridine-3'-phosphate
  modified_base 16: mod_base = OTHER; note = 2'-O-methyladenosine-3'-phosphate
  modified_base 17: mod_base = OTHER; note = 2'-O-methyladenosine-3'-phosphate
  modified_base 18: mod_base = OTHER; note = 2'-O-methyladenosine-3'-phosphate
  modified_base 19: mod_base = OTHER; note = 2'-O-methyluridine-3'-phosphate
  modified_base 20: mod_base = OTHER; note = 2'-O-methyluridine-3'-phosphate
  modified_base 21: mod_base = OTHER; note = 2'-O-methylguanosine-3'-phosphate
  modified_base 22: mod_base = OTHER; note = 2'-O-methylguanosine-3'-phosphate
  modified_base 23: mod_base = OTHER; note = 2'-O-methyluridine-3'-phosphate
  modified_base 24: mod_base = OTHER; note = 2'-O-methyladenosine-3'-phosphorothioate
  modified_base 25: mod_base = OTHER; note = inverted (3'-3' linked) abasic deoxyribonucleotide
  misc_feature 1: note = DNA
  misc_feature 2..24: note = RNA
  misc_feature 25: note = DNA
ngaggctgtaggcataaattggtan

SEQ ID NO: 249 - DNA, 27 bp, synthetic construct
  source 1..27: mol_type = other DNA
  modified_base 1: mod_base = OTHER; note 4-((1,22-bis(((2R,3R,4R,5R,6R)-3-acetamido-4,5-diacetoxy-6- (acetoxymethyl)tetrahydro-2H-pyran-2-yl)oxy)-10-((2-(2-(((2 R,3R,4R,5R,6R)-3-acetamido-4,5-diacetoxy-6-(acetoxymethyl)t etrahydro-2H-pyran-2-yl)oxy)ethoxy)ethyl)carbamoyl)-7,12,16 -trioxo-3,20-dioxa-6,11,17-triazadocosan-15-yl)carbamoyl)cy clohexyl phosphorothioate-inverted (3'-3' linked) abasic deoxyribonucleotide-5'-phosphorothioate
  modified_base 2: mod_base = OTHER; note = 2'-O-methylguanosine-3'-phosphate
  modified_base 3: mod_base = OTHER; note = 2'-O-methyladenosine-3'-phosphate
  modified_base 4: mod_base = OTHER; note = 2'-O-methylguanosine-3'-phosphate
  modified_base 5: mod_base = OTHER; note = 2'-O-methylguanosine-3'-phosphate
  modified_base 6: mod_base = OTHER; note = 2'-O-methylcytidine-3'-phosphate
  modified_base 7: mod_base = OTHER; note = 2'-O-methyluridine-3'-phosphate
  modified_base 8: mod_base = OTHER; note = 2'-O-methylguanosine-3'-phosphate
  modified_base 9: mod_base = OTHER; note = 2'-O-methyluridine-3'-phosphate
  modified_base 10: mod_base = OTHER; note = 2'-O-methyladenosine-3'-phosphate
  modified_base 11: mod_base = OTHER; note = 2'-O-methylguanosine-3'-phosphate
  modified_base 12: mod_base = OTHER; note = 2'-fluoroguanosine-3'-phosphate
  modified_base 13: mod_base = OTHER; note = 2'-fluorocytidine-3'-phosphate
  modified_base 14: mod_base = OTHER; note = 2'-fluoroadenosine-3'-phosphate
  modified_base 15: mod_base = OTHER; note = 2'-O-methyluridine-3'-phosphate
  modified_base 16: mod_base = OTHER; note = 2'-O-methyladenosine-3'-phosphate
  modified_base 17: mod_base = OTHER; note = 2'-O-methyladenosine-3'-phosphate
  modified_base 18: mod_base = OTHER; note = 2'-O-methyladenosine-3'-phosphate
  modified_base 19: mod_base = OTHER; note = 2'-O-methyluridine-3'-phosphate
  modified_base 20: mod_base = OTHER; note = 2'-O-methyluridine-3'-phosphate
  modified_base 21: mod_base = OTHER; note = 2'-O-methylguanosine-3'-phosphate
  modified_base 22: mod_base = OTHER; note = 2'-O-methylguanosine-3'-phosphate
  modified_base 23: mod_base = OTHER; note = 2'-O-methyluridine-3'-phosphate
  modified_base 24: mod_base = OTHER; note = 2'-O-methyladenosine-3'-phosphate
  modified_base 25: mod_base = OTHER; note = 2'-O-methyluridine-3'-phosphorothioate
  modified_base 26: mod_base = OTHER; note = 2'-O-methyluridine-3'-phosphate
  modified_base 27: mod_base = OTHER; note = inverted (3'-3' linked) abasic deoxyribonucleotide
  misc_feature 1: note = DNA
  misc_feature 2..26: note = RNA
  misc_feature 27: note = DNA
ngaggctgtaggcataaattggtattn

SEQ ID NO: 250 - DNA, 21 bp, synthetic construct
  source 1..21: mol_type = other DNA
  modified_base 1: mod_base = OTHER; note 4-((1,22-bis(((2R,3R,4R,5R,6R)-3-acetamido-4,5-diacetoxy-6- (acetoxymethyl)tetrahydro-2H-pyran-2-yl)oxy)-10-((2-(2-(((2 R,3R,4R,5R,6R)-3-acetamido-4,5-diacetoxy-6-(acetoxymethyl)t etrahydro-2H-pyran-2-yl)oxy)ethoxy)ethyl)carbamoyl)-7,12,16 -trioxo-3,20-dioxa-6,11,17-triazadocosan-15-yl)carbamoyl)cy clohexyl phosphorothioate-inverted (3'-3' linked) abasic deoxyribonucleotide-5'-phosphorothioate
  modified_base 2: mod_base = OTHER; note = 2'-O-methylguanosine-3'-phosphate
  modified_base 3: mod_base = OTHER; note = 2'-O-methylguanosine-3'-phosphate
  modified_base 4: mod_base = OTHER; note = 2'-O-methyladenosine-3'-phosphate
  modified_base 5: mod_base = OTHER; note = 2'-O-methylcytidine-3'-phosphate
  modified_base 6: mod_base = OTHER; note = 2'-O-methyluridine-3'-phosphate
  modified_base 7: mod_base = OTHER; note = 2'-O-methyluridine-3'-phosphate
  modified_base 8: mod_base = OTHER; note = 2'-fluorocytidine-3'-phosphate
  modified_base 9: mod_base = OTHER; note = 2'-fluorouridine-3'-phosphate
  modified_base 10: mod_base = OTHER; note = 2'-fluorocytidine-3'-phosphate
  modified_base 11: mod_base = OTHER; note = 2'-O-methyluridine-3'-phosphate
  modified_base 12: mod_base = OTHER; note = 2'-O-methylcytidine-3'-phosphate
  modified_base 13: mod_base = OTHER; note = 2'-O-methyladenosine-3'-phosphate
  modified_base 14: mod_base = OTHER; note = 2'-O-methyladenosine-3'-phosphate
  modified_base 15: mod_base = OTHER; note = 2'-O-methyluridine-3'-phosphate
  modified_base 16: mod_base = OTHER; note = 2'-O-methyluridine-3'-phosphate
  modified_base 17: mod_base = OTHER; note = 2'-O-methyluridine-3'-phosphate
  modified_base 18: mod_base = OTHER; note = 2'-O-methyluridine-3'-phosphate
  modified_base 19: mod_base = OTHER; note = 2'-O-methylcytidine-3'-phosphate
  modified_base 20: mod_base = OTHER; note = 2'-O-methyluridine-3'-phosphorothioate
  modified_base 21: mod_base = OTHER; note = inverted (3'-3' linked) abasic deoxyribonucleotide
  misc_feature 1: note = DNA
  misc_feature 2..20: note = RNA
  misc_feature 21: note = DNA
nggacttctctcaattttctn

SEQ ID NO: 251 - DNA, 21 bp, synthetic construct
  source 1..21: mol_type = other DNA
  modified_base 1: mod_base = OTHER; note 4-((1,22-bis(((2R,3R,4R,5R,6R)-3-acetamido-4,5-diacetoxy-6- (acetoxymethyl)tetrahydro-2H-pyran-2-yl)oxy)-10-((2-(2-(((2 R,3R,4R,5R,6R)-3-acetamido-4,5-diacetoxy-6-(acetoxymethyl)t etrahydro-2H-pyran-2-yl)oxy)ethoxy)ethyl)carbamoyl)-7,12,16 -trioxo-3,20-dioxa-6,11,17-triazadocosan-15-yl)carbamoyl)cy clohexyl phosphorothioate-inverted (3'-3' linked) abasic deoxyribonucleotide-5'-phosphorothioate
  modified_base 2: mod_base = OTHER; note = 2'-O-methylguanosine-3'-phosphate
  modified_base 3: mod_base = OTHER; note = 2'-O-methylguanosine-3'-phosphate
  modified_base 4: mod_base = OTHER; note = 2'-O-methyladenosine-3'-phosphate
  modified_base 5: mod_base = OTHER; note = 2'-O-methylcytidine-3'-phosphate
  modified_base 6: mod_base = OTHER; note = 2'-O-methyluridine-3'-phosphate
  modified_base 7: mod_base = OTHER; note = 2'-O-methyluridine-3'-phosphate
  modified_base 8: mod_base = OTHER; note = 2'-fluorocytidine-3'-phosphate
  modified_base 9: mod_base = OTHER; note = 2'-fluorouridine-3'-phosphate
  modified_base 10: mod_base = OTHER; note = 2'-fluorocytidine-3'-phosphate
  modified_base 11: mod_base = OTHER; note = 2'-O-methyluridine-3'-phosphate
  modified_base 12: mod_base = OTHER; note = 2'-O-methylcytidine-3'-phosphate
  modified_base 13: mod_base = OTHER; note = 2'-O-methyladenosine-3'-phosphate
  modified_base 14: mod_base = OTHER; note = 2'-O-methyladenosine-3'-phosphate
  modified_base 15: mod_base = OTHER; note = 2'-O-methyluridine-3'-phosphate
  modified_base 16: mod_base = OTHER; note = 2'-O-methyluridine-3'-phosphate
  modified_base 17: mod_base = OTHER; note = 2'-O-methyluridine-3'-phosphate
  modified_base 18: mod_base = OTHER; note = 2'-O-methyluridine-3'-phosphate
  modified_base 19: mod_base = OTHER; note = 2'-O-methylcytidine-3'-phosphate
  modified_base 20: mod_base = OTHER; note = 2'-O-methyladenosine-3'-phosphorothioate
  modified_base 21: mod_base = OTHER; note = inverted (3'-3' linked) abasic deoxyribonucleotide
  misc_feature 1: note = DNA
  misc_feature 2..20: note = RNA
  misc_feature 21: note = DNA
nggacttctctcaattttcan

SEQ ID NO: 252 - DNA, 23 bp, synthetic construct
  source 1..23: mol_type = other DNA
  modified_base 1: mod_base = OTHER; note 4-((1,22-bis(((2R,3R,4R,5R,6R)-3-acetamido-4,5-diacetoxy-6- (acetoxymethyl)tetrahydro-2H-pyran-2-yl)oxy)-10-((2-(2-(((2 R,3R,4R,5R,6R)-3-acetamido-4,5-diacetoxy-6-(acetoxymethyl)t etrahydro-2H-pyran-2-yl)oxy)ethoxy)ethyl)carbamoyl)-7,12,16 -trioxo-3,20-dioxa-6,11,17-triazadocosan-15-yl)carbamoyl)cy clohexyl phosphorothioate-inverted (3'-3' linked) abasic deoxyribonucleotide-5'-phosphorothioate
  modified_base 2: mod_base = OTHER; note = 2'-O-methylguanosine-3'-phosphate
  modified_base 3: mod_base = OTHER; note = 2'-O-methyluridine-3'-phosphate
  modified_base 4: mod_base = OTHER; note = 2'-O-methylguanosine-3'-phosphate
  modified_base 5: mod_base = OTHER; note = 2'-O-methylguanosine-3'-phosphate
  modified_base 6: mod_base = OTHER; note = 2'-O-methyladenosine-3'-phosphate
  modified_base 7: mod_base = OTHER; note = 2'-O-methylcytidine-3'-phosphate
  modified_base 8: mod_base = OTHER; note = 2'-O-methyluridine-3'-phosphate
  modified_base 9: mod_base = OTHER; note = 2'-O-methyluridine-3'-phosphate
  modified_base 10: mod_base = OTHER; note = 2'-fluorocytidine-3'-phosphate
  modified_base 11: mod_base = OTHER; note = 2'-fluorouridine-3'-phosphate
  modified_base 12: mod_base = OTHER; note = 2'-fluorocytidine-3'-phosphate
  modified_base 13: mod_base = OTHER; note = 2'-O-methyluridine-3'-phosphate
  modified_base 14: mod_base = OTHER; note = 2'-O-methylcytidine-3'-phosphate
  modified_base 15: mod_base = OTHER; note = 2'-O-methyladenosine-3'-phosphate
  modified_base 16: mod_base = OTHER; note = 2'-O-methyladenosine-3'-phosphate
  modified_base 17: mod_base = OTHER; note = 2'-O-methyluridine-3'-phosphate
  modified_base 18: mod_base = OTHER; note = 2'-O-methyluridine-3'-phosphate
  modified_base 19: mod_base = OTHER; note = 2'-O-methyluridine-3'-phosphate
  modified_base 20: mod_base = OTHER; note = 2'-O-methyluridine-3'-phosphate
  modified_base 21: mod_base = OTHER; note = 2'-O-methylcytidine-3'-phosphate
  modified_base 22: mod_base = OTHER; note = 2'-O-methyladenosine-3'-phosphorothioate
  modified_base 23: mod_base = OTHER; note = inverted (3'-3' linked) abasic deoxyribonucleotide
  misc_feature 1: note = DNA
  misc_feature 2..22: note = RNA
  misc_feature 23: note = DNA
ngtggacttctctcaattttcan

SEQ ID NO: 253 - DNA, 21 bp, synthetic construct
  source 1..21: mol_type = other DNA
  modified_base 1: mod_base = OTHER; note 4-((1,22-bis(((2R,3R,4R,5R,6R)-3-acetamido-4,5-diacetoxy-6- (acetoxymethyl)tetrahydro-2H-pyran-2-yl)oxy)-10-((2-(2-(((2 R,3R,4R,5R,6R)-3-acetamido-4,5-diacetoxy-6-(acetoxymethyl)t etrahydro-2H-pyran-2-yl)oxy)ethoxy)ethyl)carbamoyl)-7,12,16 -trioxo-3,20-dioxa-6,11,17-triazadocosan-15-yl)carbamoyl)cy clohexyl phosphorothioate-inverted (3'-3' linked) abasic deoxyribonucleotide-5'-phosphorothioate
  modified_base 2: mod_base = OTHER; note = 2'-O-methylguanosine-3'-phosphate
  modified_base 3: mod_base = OTHER; note = 2'-O-methylcytidine-3'-phosphate
  modified_base 4: mod_base = OTHER; note = 2'-O-methyluridine-3'-phosphate
  modified_base 5: mod_base = OTHER; note = 2'-O-methylguanosine-3'-phosphate
  modified_base 6: mod_base = OTHER; note = 2'-O-methyluridine-3'-phosphate
  modified_base 7: mod_base = OTHER; note = 2'-O-methyladenosine-3'-phosphate
  modified_base 8: mod_base = OTHER; note = 2'-fluoroguanosine-3'-phosphate
  modified_base 9: mod_base = OTHER; note = 2'-fluoroguanosine-3'-phosphate
  modified_base 10: mod_base = OTHER; note = 2'-fluorocytidine-3'-phosphate
  modified_base 11: mod_base = OTHER; note = 2'-O-methyladenosine-3'-phosphate
  modified_base 12: mod_base = OTHER; note = 2'-O-methyluridine-3'-phosphate
  modified_base 13: mod_base = OTHER; note = 2'-O-methyladenosine-3'-phosphate
  modified_base 14: mod_base = OTHER; note = 2'-O-methyladenosine-3'-phosphate
  modified_base 15: mod_base = OTHER; note = 2'-O-methyladenosine-3'-phosphate
  modified_base 16: mod_base = OTHER; note = 2'-O-methyluridine-3'-phosphate
  modified_base 17: mod_base = OTHER; note = 2'-O-methyluridine-3'-phosphate
  modified_base 18: mod_base = OTHER; note = 2'-O-methylguanosine-3'-phosphate
  modified_base 19: mod_base = OTHER; note = 2'-O-methylguanosine-3'-phosphate
  modified_base 20: mod_base = OTHER; note = 2'-O-methyluridine-3'-phosphorothioate
  modified_base 21: mod_base = OTHER; note = inverted (3'-3' linked) abasic deoxyribonucleotide
  misc_feature 1: note = DNA
  misc_feature 2..20: note = RNA
  misc_feature 21: note = DNA
ngctgtaggcataaattggtn

SEQ ID NO: 254 - DNA, 22 bp, synthetic construct
  source 1..22: mol_type = other DNA
  modified_base 1: mod_base = OTHER; note 4-((1,22-bis(((2R,3R,4R,5R,6R)-3-acetamido-4,5-diacetoxy-6- (acetoxymethyl)tetrahydro-2H-pyran-2-yl)oxy)-10-((2-(2-(((2 R,3R,4R,5R,6R)-3-acetamido-4,5-diacetoxy-6-(acetoxymethyl)t etrahydro-2H-pyran-2-yl)oxy)ethoxy)ethyl)carbamoyl)-7,12,16 -trioxo-3,20-dioxa-6,11,17-triazadocosan-15-yl)carbamoyl)cy clohexyl phosphorothioate-inverted (3'-3' linked) abasic deoxyribonucleotide-5'-phosphorothioate
  modified_base 2: mod_base = OTHER; note = 2'-O-methylguanosine-3'-phosphate
  modified_base 3: mod_base = OTHER; note = 2'-O-methylguanosine-3'-phosphate
  modified_base 4: mod_base = OTHER; note = 2'-O-methylcytidine-3'-phosphate
  modified_base 5: mod_base = OTHER; note = 2'-O-methyluridine-3'-phosphate
  modified_base 6: mod_base = OTHER; note = 2'-O-methylguanosine-3'-phosphate
  modified_base 7: mod_base = OTHER; note = 2'-O-methyluridine-3'-phosphate
  modified_base 8: mod_base = OTHER; note = 2'-O-methyladenosine-3'-phosphate
  modified_base 9: mod_base = OTHER; note = 2'-fluoroguanosine-3'-phosphate
  modified_base 10: mod_base = OTHER; note = 2'-fluoroguanosine-3'-phosphate
  modified_base 11: mod_base = OTHER; note = 2'-fluorocytidine-3'-phosphate
  modified_base 12: mod_base = OTHER; note = 2'-O-methyladenosine-3'-phosphate
  modified_base 13: mod_base = OTHER; note = 2'-O-methyluridine-3'-phosphate
  modified_base 14: mod_base = OTHER; note = 2'-O-methyladenosine-3'-phosphate
  modified_base 15: mod_base = OTHER; note = 2'-O-methyladenosine-3'-phosphate
  modified_base 16: mod_base = OTHER; note = 2'-O-methyladenosine-3'-phosphate
  modified_base 17: mod_base = OTHER; note = 2'-O-methyluridine-3'-phosphate
  modified_base 18: mod_base = OTHER; note = 2'-O-methyluridine-3'-phosphate
  modified_base 19: mod_base = OTHER; note = 2'-O-methylguanosine-3'-phosphate
  modified_base 20: mod_base = OTHER; note = 2'-O-methylguanosine-3'-phosphate
  modified_base 21: mod_base = OTHER; note = 2'-O-methyluridine-3'-phosphorothioate
  modified_base 22: mod_base = OTHER; note = inverted (3'-3' linked) abasic deoxyribonucleotide
  misc_feature 1: note = DNA
  misc_feature 2..21: note = RNA
  misc_feature 22: note = DNA
nggctgtaggcataaattggtn

SEQ ID NO: 255 - DNA, 24 bp, synthetic construct
  source 1..24: mol_type = other DNA
  modified_base 1: mod_base = OTHER; note 4-((1,22-bis(((2R,3R,4R,5R,6R)-3-acetamido-4,5-diacetoxy-6- (acetoxymethyl)tetrahydro-2H-pyran-2-yl)oxy)-10-((2-(2-(((2 R,3R,4R,5R,6R)-3-acetamido-4,5-diacetoxy-6-(acetoxymethyl)t etrahydro-2H-pyran-2-yl)oxy)ethoxy)ethyl)carbamoyl)-7,12,16 -trioxo-3,20-dioxa-6,11,17-triazadocosan-15-yl)carbamoyl)cy clohexyl phosphorothioate-inverted (3'-3' linked) abasic deoxyribonucleotide-5'-phosphorothioate
  modified_base 2: mod_base = OTHER; note = 2'-O-methylguanosine-3'-phosphate
  modified_base 3: mod_base = OTHER; note = 2'-O-methyladenosine-3'-phosphate
  modified_base 4: mod_base = OTHER; note = 2'-O-methylguanosine-3'-phosphate
  modified_base 5: mod_base = OTHER; note = 2'-O-methylguanosine-3'-phosphate
  modified_base 6: mod_base = OTHER; note = 2'-O-methylcytidine-3'-phosphate
  modified_base 7: mod_base = OTHER; note = 2'-O-methyluridine-3'-phosphate
  modified_base 8: mod_base = OTHER; note = 2'-O-methylguanosine-3'-phosphate
  modified_base 9: mod_base = OTHER; note = 2'-O-methyluridine-3'-phosphate
  modified_base 10: mod_base = OTHER; note = 2'-O-methyladenosine-3'-phosphate
  modified_base 11: mod_base = OTHER; note = 2'-fluoroguanosine-3'-phosphate
  modified_base 12: mod_base = OTHER; note = 2'-fluoroguanosine-3'-phosphate
  modified_base 13: mod_base = OTHER; note = 2'-fluorocytidine-3'-phosphate
  modified_base 14: mod_base = OTHER; note = 2'-O-methyladenosine-3'-phosphate
  modified_base 15: mod_base = OTHER; note = 2'-O-methyluridine-3'-phosphate
  modified_base 16: mod_base = OTHER; note = 2'-O-methyladenosine-3'-phosphate
  modified_base 17: mod_base = OTHER; note = 2'-O-methyladenosine-3'-phosphate
  modified_base 18: mod_base = OTHER; note = 2'-O-methyladenosine-3'-phosphate
  modified_base 19: mod_base = OTHER; note = 2'-O-methyluridine-3'-phosphate
  modified_base 20: mod_base = OTHER; note = 2'-O-methyluridine-3'-phosphate
  modified_base 21: mod_base = OTHER; note = 2'-O-methylguanosine-3'-phosphate
  modified_base 22: mod_base = OTHER; note = 2'-O-methylguanosine-3'-phosphate
  modified_base 23: mod_base = OTHER; note = 2'-O-methyluridine-3'-phosphorothioate
  modified_base 24: mod_base = OTHER; note = inverted (3'-3' linked) abasic deoxyribonucleotide
  misc_feature 1: note = DNA
  misc_feature 2..23: note = RNA
  misc_feature 24: note = DNA
ngaggctgtaggcataaattggtn

SEQ ID NO: 256 - DNA, 21 bp, synthetic construct
  source 1..21: mol_type = other DNA
  modified_base 1: mod_base = OTHER; note 4-((1,22-bis(((2R,3R,4R,5R,6R)-3-acetamido-4,5-diacetoxy-6- (acetoxymethyl)tetrahydro-2H-pyran-2-yl)oxy)-10-((2-(2-(((2 R,3R,4R,5R,6R)-3-acetamido-4,5-diacetoxy-6-(acetoxymethyl)t etrahydro-2H-pyran-2-yl)oxy)ethoxy)ethyl)carbamoyl)-7,12,16 -trioxo-3,20-dioxa-6,11,17-triazadocosan-15-yl)carbamoyl)cy clohexyl phosphorothioate-inverted (3'-3' linked) abasic deoxyribonucleotide-5'-phosphorothioate
  modified_base 2: mod_base = OTHER; note = 2'-O-methylguanosine-3'-phosphate
  modified_base 3: mod_base = OTHER; note = 2'-O-methylcytidine-3'-phosphate
  modified_base 4: mod_base = OTHER; note = 2'-O-methyluridine-3'-phosphate
  modified_base 5: mod_base = OTHER; note = 2'-O-methylguanosine-3'-phosphate
  modified_base 6: mod_base = OTHER; note = 2'-O-methyluridine-3'-phosphate
  modified_base 7: mod_base = OTHER; note = 2'-O-methyladenosine-3'-phosphate
  modified_base 8: mod_base = OTHER; note = 2'-fluoroguanosine-3'-phosphate
  modified_base 9: mod_base = OTHER; note = 2'-fluoroguanosine-3'-phosphate
  modified_base 10: mod_base = OTHER; note = 2'-fluorocytidine-3'-phosphate
  modified_base 11: mod_base = OTHER; note = 2'-O-methyladenosine-3'-phosphate
  modified_base 12: mod_base = OTHER; note = 2'-O-methyluridine-3'-phosphate
  modified_base 13: mod_base = OTHER; note = 2'-O-methyladenosine-3'-phosphate
  modified_base 14: mod_base = OTHER; note = 2'-O-methyladenosine-3'-phosphate
  modified_base 15: mod_base = OTHER; note = 2'-O-methyladenosine-3'-phosphate
  modified_base 16: mod_base = OTHER; note = 2'-O-methyluridine-3'-phosphate
  modified_base 17: mod_base = OTHER; note = 2'-O-methyluridine-3'-phosphate
  modified_base 18: mod_base = OTHER; note = 2'-O-methylguanosine-3'-phosphate
  modified_base 19: mod_base = OTHER; note = 2'-O-methylguanosine-3'-phosphate
  modified_base 20: mod_base = OTHER; note = 2'-O-methyladenosine-3'-phosphorothioate
  modified_base 21: mod_base = OTHER; note = inverted (3'-3' linked) abasic deoxyribonucleotide
  misc_feature 1: note = DNA
  misc_feature 2..20: note = RNA
  misc_feature 21: note = DNA
ngctgtaggcataaattggan

SEQ ID NO: 257 - DNA, 22 bp, synthetic construct
  source 1..22: mol_type = other DNA
  modified_base 1: mod_base = OTHER; note 4-((1,22-bis(((2R,3R,4R,5R,6R)-3-acetamido-4,5-diacetoxy-6- (acetoxymethyl)tetrahydro-2H-pyran-2-yl)oxy)-10-((2-(2-(((2 R,3R,4R,5R,6R)-3-acetamido-4,5-diacetoxy-6-(acetoxymethyl)t etrahydro-2H-pyran-2-yl)oxy)ethoxy)ethyl)carbamoyl)-7,12,16 -trioxo-3,20-dioxa-6,11,17-triazadocosan-15-yl)carbamoyl)cy clohexyl phosphorothioate-inverted (3'-3' linked) abasic deoxyribonucleotide-5'-phosphorothioate
  modified_base 2: mod_base = OTHER; note = 2'-O-methylguanosine-3'-phosphate
  modified_base 3: mod_base = OTHER; note = 2'-O-methylguanosine-3'-phosphate
  modified_base 4: mod_base = OTHER; note = 2'-O-methylcytidine-3'-phosphate
  modified_base 5: mod_base = OTHER; note = 2'-O-methyluridine-3'-phosphate
  modified_base 6: mod_base = OTHER; note = 2'-O-methylguanosine-3'-phosphate
  modified_base 7: mod_base = OTHER; note = 2'-O-methyluridine-3'-phosphate
  modified_base 8: mod_base = OTHER; note = 2'-O-methyladenosine-3'-phosphate
  modified_base 9: mod_base = OTHER; note = 2'-fluoroguanosine-3'-phosphate
  modified_base 10: mod_base = OTHER; note = 2'-fluoroguanosine-3'-phosphate
  modified_base 11: mod_base = OTHER; note = 2'-fluorocytidine-3'-phosphate
  modified_base 12: mod_base = OTHER; note = 2'-O-methyladenosine-3'-phosphate
  modified_base 13: mod_base = OTHER; note = 2'-O-methyluridine-3'-phosphate
  modified_base 14: mod_base = OTHER; note = 2'-O-methyladenosine-3'-phosphate
  modified_base 15: mod_base = OTHER; note = 2'-O-methyladenosine-3'-phosphate
  modified_base 16: mod_base = OTHER; note = 2'-O-methyladenosine-3'-phosphate
  modified_base 17: mod_base = OTHER; note = 2'-O-methyluridine-3'-phosphate
  modified_base 18: mod_base = OTHER; note = 2'-O-methyluridine-3'-phosphate
  modified_base 19: mod_base = OTHER; note = 2'-O-methylguanosine-3'-phosphate
  modified_base 20: mod_base = OTHER; note = 2'-O-methylguanosine-3'-phosphate
  modified_base 21: mod_base = OTHER; note = 2'-O-methyladenosine-3'-phosphorothioate
  modified_base 22: mod_base = OTHER; note = inverted (3'-3' linked) abasic deoxyribonucleotide
  misc_feature 1: note = DNA
  misc_feature 2..21: note = RNA
  misc_feature 22: note = DNA
nggctgtaggcataaattggan

SEQ ID NO: 258 - DNA, 23 bp, synthetic construct
  source 1..23: mol_type = other DNA
  modified_base 1: mod_base = OTHER; note 4-((1,22-bis(((2R,3R,4R,5R,6R)-3-acetamido-4,5-diacetoxy-6- (acetoxymethyl)tetrahydro-2H-pyran-2-yl)oxy)-10-((2-(2-(((2 R,3R,4R,5R,6R)-3-acetamido-4,5-diacetoxy-6-(acetoxymethyl)t etrahydro-2H-pyran-2-yl)oxy)ethoxy)ethyl)carbamoyl)-7,12,16 -trioxo-3,20-dioxa-6,11,17-triazadocosan-15-yl)carbamoyl)cy clohexyl phosphorothioate-inverted (3'-3' linked) abasic deoxyribonucleotide-5'-phosphorothioate
  modified_base 2: mod_base = OTHER; note = 2'-O-methyladenosine-3'-phosphate
  modified_base 3: mod_base = OTHER; note = 2'-O-methylguanosine-3'-phosphate
  modified_base 4: mod_base = OTHER; note = 2'-O-methylcytidine-3'-phosphate
  modified_base 5: mod_base = OTHER; note = 2'-O-methyluridine-3'-phosphate
  modified_base 6: mod_base = OTHER; note = 2'-O-methylguanosine-3'-phosphate
  modified_base 7: mod_base = OTHER; note = 2'-O-methyluridine-3'-phosphate
  modified_base 8: mod_base = OTHER; note = 2'-O-methyladenosine-3'-phosphate
  modified_base 9: mod_base = OTHER; note = 2'-O-methylguanosine-3'-phosphate
  modified_base 10: mod_base = OTHER; note = 2'-fluoroguanosine-3'-phosphate
  modified_base 11: mod_base = OTHER; note = 2'-fluorocytidine-3'-phosphate
  modified_base 12: mod_base = OTHER; note = 2'-fluoroadenosine-3'-phosphate
  modified_base 13: mod_base = OTHER; note = 2'-O-methyluridine-3'-phosphate
  modified_base 14: mod_base = OTHER; note = 2'-O-methyladenosine-3'-phosphate
  modified_base 15: mod_base = OTHER; note = 2'-O-methyladenosine-3'-phosphate
  modified_base 16: mod_base = OTHER; note = 2'-O-methyladenosine-3'-phosphate
  modified_base 17: mod_base = OTHER; note = 2'-O-methyluridine-3'-phosphate
  modified_base 18: mod_base = OTHER; note = 2'-O-methyluridine-3'-phosphate
  modified_base 19: mod_base = OTHER; note = 2'-O-methylguanosine-3'-phosphate
  modified_base 20: mod_base = OTHER; note = 2'-O-methylguanosine-3'-phosphate
  modified_base 21: mod_base = OTHER; note = 2'-O-methyluridine-3'-phosphate
  modified_base 22: mod_base = OTHER; note = 2'-O-methyladenosine-3'-phosphorothioate
  modified_base 23: mod_base = OTHER; note = inverted (3'-3' linked) abasic deoxyribonucleotide
  misc_feature 1: note = DNA
  misc_feature 2..22: note = RNA
  misc_feature 23: note = DNA
nagctgtaggcataaattggtan

SEQ ID NO: 259 - DNA, 23 bp, synthetic construct
  source 1..23: mol_type = other DNA
  modified_base 1: mod_base = OTHER; note 4-((1,22-bis(((2R,3R,4R,5R,6R)-3-acetamido-4,5-diacetoxy-6- (acetoxymethyl)tetrahydro-2H-pyran-2-yl)oxy)-10-((2-(2-(((2 R,3R,4R,5R,6R)-3-acetamido-4,5-diacetoxy-6-(acetoxymethyl)t etrahydro-2H-pyran-2-yl)oxy)ethoxy)ethyl)carbamoyl)-7,12,16 -trioxo-3,20-dioxa-6,11,17-triazadocosan-15-yl)carbamoyl)cy clohexyl phosphorothioate-inverted (3'-3' linked) abasic deoxyribonucleotide-5'-phosphorothioate
  modified_base 2: mod_base = OTHER; note = 2'-O-methylguanosine-3'-phosphate
  modified_base 3: mod_base = OTHER; note = 2'-O-methylguanosine-3'-phosphate
  modified_base 4: mod_base = OTHER; note = 2'-O-methylcytidine-3'-phosphate
  modified_base 5: mod_base = OTHER; note = 2'-O-methyluridine-3'-phosphate
  modified_base 6: mod_base = OTHER; note = 2'-O-methylguanosine-3'-phosphate
  modified_base 7: mod_base = OTHER; note = 2'-O-methyluridine-3'-phosphate
  modified_base 8: mod_base = OTHER; note = 2'-O-methyladenosine-3'-phosphate
  modified_base 9: mod_base = OTHER; note = 2'-O-methylguanosine-3'-phosphate
  modified_base 10: mod_base = OTHER; note = 2'-fluoroguanosine-3'-phosphate
  modified_base 11: mod_base = OTHER; note = 2'-fluorocytidine-3'-phosphate
  modified_base 12: mod_base = OTHER; note = 2'-fluoroadenosine-3'-phosphate
  modified_base 13: mod_base = OTHER; note = 2'-O-methyluridine-3'-phosphate
  modified_base 14: mod_base = OTHER; note = 2'-O-methyladenosine-3'-phosphate
  modified_base 15: mod_base = OTHER; note = 2'-O-methyladenosine-3'-phosphate
  modified_base 16: mod_base = OTHER; note = 2'-O-methyladenosine-3'-phosphate
  modified_base 17: mod_base = OTHER; note = 2'-O-methyluridine-3'-phosphate
  modified_base 18: mod_base = OTHER; note = 2'-O-methyluridine-3'-phosphate
  modified_base 19: mod_base = OTHER; note = 2'-O-methylguanosine-3'-phosphate
  modified_base 20: mod_base = OTHER; note = 2'-O-methylguanosine-3'-phosphate
  modified_base 21: mod_base = OTHER; note = 2'-O-methyluridine-3'-phosphate
  modified_base 22: mod_base = OTHER; note = 2'-O-methyluridine-3'-phosphorothioate
  modified_base 23: mod_base = OTHER; note = inverted (3'-3' linked) abasic deoxyribonucleotide
  misc_feature 1: note = DNA
  misc_feature 2..22: note = RNA
  misc_feature 23: note = DNA
nggctgtaggcataaattggttn

SEQ ID NO: 260 - DNA, 23 bp, synthetic construct
  source 1..23: mol_type = other DNA
  modified_base 1: mod_base = OTHER; note 4-((1,22-bis(((2R,3R,4R,5R,6R)-3-acetamido-4,5-diacetoxy-6- (acetoxymethyl)tetrahydro-2H-pyran-2-yl)oxy)-10-((2-(2-(((2 R,3R,4R,5R,6R)-3-acetamido-4,5-diacetoxy-6-(acetoxymethyl)t etrahydro-2H-pyran-2-yl)oxy)ethoxy)ethyl)carbamoyl)-7,12,16 -trioxo-3,20-dioxa-6,11,17-triazadocosan-15-yl)carbamoyl)cy clohexyl phosphorothioate-inverted (3'-3' linked) abasic deoxyribonucleotide-5'-phosphorothioate
  modified_base 2: mod_base = OTHER; note = 2'-O-methylcytidine-3'-phosphate
  modified_base 3: mod_base = OTHER; note = 2'-O-methyluridine-3'-phosphate
  modified_base 4: mod_base = OTHER; note = 2'-O-methylguanosine-3'-phosphate
  modified_base 5: mod_base = OTHER; note = 2'-O-methyluridine-3'-phosphate
  modified_base 6: mod_base = OTHER; note = 2'-O-methyladenosine-3'-phosphate
  modified_base 7: mod_base = OTHER; note = 2'-O-methylguanosine-3'-phosphate
  modified_base 8: mod_base = OTHER; note = 2'-fluoroguanosine-3'-phosphate
  modified_base 9: mod_base = OTHER; note = 2'-fluorocytidine-3'-phosphate
  modified_base 10: mod_base = OTHER; note = 2'-fluoroadenosine-3'-phosphate
  modified_base 11: mod_base = OTHER; note = 2'-O-methyluridine-3'-phosphate
  modified_base 12: mod_base = OTHER; note = 2'-O-methyladenosine-3'-phosphate
  modified_base 13: mod_base = OTHER; note = 2'-O-methyladenosine-3'-phosphate
  modified_base 14: mod_base = OTHER; note = 2'-O-methyladenosine-3'-phosphate
  modified_base 15: mod_base = OTHER; note = 2'-O-methyluridine-3'-phosphate
  modified_base 16: mod_base = OTHER; note = 2'-O-methyluridine-3'-phosphate
  modified_base 17: mod_base = OTHER; note = 2'-O-methylguanosine-3'-phosphate
  modified_base 18: mod_base = OTHER; note = 2'-O-methylguanosine-3'-phosphate
  modified_base 19: mod_base = OTHER; note = 2'-O-methyluridine-3'-phosphate
  modified_base 20: mod_base = OTHER; note = 2'-O-methyladenosine-3'-phosphorothioate
  modified_base 21: mod_base = OTHER; note = 2'-O-methyluridine-3'-phosphate
  modified_base 22: mod_base = OTHER; note = 2'-O-methyluridine-3'-phosphorothioate
  modified_base 23: mod_base = OTHER; note = inverted (3'-3' linked) abasic deoxyribonucleotide
  misc_feature 1: note = DNA
  misc_feature 2..22: note = RNA
  misc_feature 23: note = DNA
nctgtaggcataaattggtattn

SEQ ID NO: 261 - DNA, 23 bp, synthetic construct
  source 1..23: mol_type = other DNA
  modified_base 1: mod_base = OTHER; note 4-((1,22-bis(((2R,3R,4R,5R,6R)-3-acetamido-4,5-diacetoxy-6- (acetoxymethyl)tetrahydro-2H-pyran-2-yl)oxy)-10-((2-(2-(((2 R,3R,4R,5R,6R)-3-acetamido-4,5-diacetoxy-6-(acetoxymethyl)t etrahydro-2H-pyran-2-yl)oxy)ethoxy)ethyl)carbamoyl)-7,12,16 -trioxo-3,20-dioxa-6,11,17-triazadocosan-15-yl)carbamoyl)cy clohexyl phosphorothioate-inverted (3'-3' linked) abasic deoxyribonucleotide-5'-phosphorothioate
  modified_base 2: mod_base = OTHER; note = 2'-O-methylcytidine-3'-phosphate
  modified_base 3: mod_base = OTHER; note = 2'-O-methyluridine-3'-phosphate
  modified_base 4: mod_base = OTHER; note = 2'-fluoroguanosine-3'-phosphate
  modified_base 5: mod_base = OTHER; note = 2'-O-methyluridine-3'-phosphate
  modified_base 6: mod_base = OTHER; note = 2'-fluoroadenosine-3'-phosphate
  modified_base 7: mod_base = OTHER; note = 2'-O-methylguanosine-3'-phosphate
  modified_base 8: mod_base = OTHER; note = 2'-fluoroguanosine-3'-phosphate
  modified_base 9: mod_base = OTHER; note = 2'-fluorocytidine-3'-phosphate
  modified_base 10: mod_base = OTHER; note = 2'-fluoroadenosine-3'-phosphate
  modified_base 11: mod_base = OTHER; note = 2'-O-methyluridine-3'-phosphate
  modified_base 12: mod_base = OTHER; note = 2'-fluoroadenosine-3'-phosphate
  modified_base 13: mod_base = OTHER; note = 2'-O-methyladenosine-3'-phosphate
  modified_base 14: mod_base = OTHER; note = 2'-fluoroadenosine-3'-phosphate
  modified_base 15: mod_base = OTHER; note = 2'-O-methyluridine-3'-phosphate
  modified_base 16: mod_base = OTHER; note = 2'-fluorouridine-3'-phosphate
  modified_base 17: mod_base = OTHER; note = 2'-O-methylguanosine-3'-phosphate
  modified_base 18: mod_base = OTHER; note = 2'-fluoroguanosine-3'-phosphate
  modified_base 19: mod_base = OTHER; note = 2'-O-methyluridine-3'-phosphate
  modified_base 20: mod_base = OTHER; note = 2'-O-methyladenosine-3'-phosphorothioate
  modified_base 21: mod_base = OTHER; note = 2'-O-methyluridine-3'-phosphate
  modified_base 22: mod_base = OTHER; note = 2'-O-methyluridine-3'-phosphorothioate
  modified_base 23: mod_base = OTHER; note = inverted (3'-3' linked) abasic deoxyribonucleotide
  misc_feature 1: note = DNA
  misc_feature 2..22: note = RNA
  misc_feature 23: note = DNA
nctgtaggcataaattggtattn

SEQ ID NO: 262 - DNA, 23 bp, synthetic construct
  source 1..23: mol_type = other DNA
  modified_base 1: mod_base = OTHER; note 4-((1,22-bis(((2R,3R,4R,5R,6R)-3-acetamido-4,5-diacetoxy-6- (acetoxymethyl)tetrahydro-2H-pyran-2-yl)oxy)-10-((2-(2-(((2 R,3R,4R,5R,6R)-3-acetamido-4,5-diacetoxy-6-(acetoxymethyl)t etrahydro-2H-pyran-2-yl)oxy)ethoxy)ethyl)carbamoyl)-7,12,16 -trioxo-3,20-dioxa-6,11,17-triazadocosan-15-yl)carbamoyl)cy clohexyl phosphorothioate-inverted (3'-3' linked) abasic deoxyribonucleotide-5'-phosphorothioate
  modified_base 2: mod_base = OTHER; note = 2'-O-methyladenosine-3'-phosphate
  modified_base 3: mod_base = OTHER; note = 2'-O-methylguanosine-3'-phosphate
  modified_base 4: mod_base = OTHER; note = 2'-O-methylguanosine-3'-phosphate
  modified_base 5: mod_base = OTHER; note = 2'-O-methylcytidine-3'-phosphate
  modified_base 6: mod_base = OTHER; note = 2'-O-methyluridine-3'-phosphate
  modified_base 7: mod_base = OTHER; note = 2'-O-methylguanosine-3'-phosphate
  modified_base 8: mod_base = OTHER; note = 2'-O-methyluridine-3'-phosphate
  modified_base 9: mod_base = OTHER; note = 2'-O-methyladenosine-3'-phosphate
  modified_base 10: mod_base = OTHER; note = 2'-fluoroguanosine-3'-phosphate
  modified_base 11: mod_base = OTHER; note = 2'-fluoroguanosine-3'-phosphate
  modified_base 12: mod_base = OTHER; note = 2'-fluorocytidine-3'-phosphate
  modified_base 13: mod_base = OTHER; note = 2'-O-methyladenosine-3'-phosphate
  modified_base 14: mod_base = OTHER; note = 2'-O-methyluridine-3'-phosphate
  modified_base 15: mod_base = OTHER; note = 2'-O-methyladenosine-3'-phosphate
  modified_base 16: mod_base = OTHER; note = 2'-O-methyladenosine-3'-phosphate
  modified_base 17: mod_base = OTHER; note = 2'-O-methyladenosine-3'-phosphate
  modified_base 18: mod_base = OTHER; note = 2'-O-methyluridine-3'-phosphate
  modified_base 19: mod_base = OTHER; note = 2'-O-methyluridine-3'-phosphate
  modified_base 20: mod_base = OTHER; note = 2'-O-methylguanosine-3'-phosphate
  modified_base 21: mod_base = OTHER; note = 2'-O-methylguanosine-3'-phosphate
  modified_base 22: mod_base = OTHER; note = 2'-O-methyluridine-3'-phosphorothioate
  modified_base 23: mod_base = OTHER; note = inverted (3'-3' linked) abasic deoxyribonucleotide
  misc_feature 1: note = DNA
  misc_feature 2..22: note = RNA
  misc_feature 23: note = DNA
naggctgtaggcataaattggtn

SEQ ID NO: 263 - DNA, 23 bp, synthetic construct
  source 1..23: mol_type = other DNA
  modified_base 1: mod_base = OTHER; note 4-((1,22-bis(((2R,3R,4R,5R,6R)-3-acetamido-4,5-diacetoxy-6- (acetoxymethyl)tetrahydro-2H-pyran-2-yl)oxy)-10-((2-(2-(((2 R,3R,4R,5R,6R)-3-acetamido-4,5-diacetoxy-6-(acetoxymethyl)t etrahydro-2H-pyran-2-yl)oxy)ethoxy)ethyl)carbamoyl)-7,12,16 -trioxo-3,20-dioxa-6,11,17-triazadocosan-15-yl)carbamoyl)cy clohexyl phosphorothioate-inverted (3'-3' linked) abasic deoxyribonucleotide-5'-phosphorothioate
  modified_base 2: mod_base = OTHER; note = 2'-O-methyladenosine-3'-phosphate
  modified_base 3: mod_base = OTHER; note = 2'-O-methylguanosine-3'-phosphate
  modified_base 4: mod_base = OTHER; note = 2'-O-methylguanosine-3'-phosphate
  modified_base 5: mod_base = OTHER; note = 2'-O-methylcytidine-3'-phosphate
  modified_base 6: mod_base = OTHER; note = 2'-O-methyluridine-3'-phosphate
  modified_base 7: mod_base = OTHER; note = 2'-O-methylguanosine-3'-phosphate
  modified_base 8: mod_base = OTHER; note = 2'-O-methyluridine-3'-phosphate
  modified_base 9: mod_base = OTHER; note = 2'-O-methyladenosine-3'-phosphate
  modified_base 10: mod_base = OTHER; note = 2'-fluoroguanosine-3'-phosphate
  modified_base 11: mod_base = OTHER; note = 2'-fluoroguanosine-3'-phosphate
  modified_base 12: mod_base = OTHER; note = 2'-fluorocytidine-3'-phosphate
  modified_base 13: mod_base = OTHER; note = 2'-O-methyladenosine-3'-phosphate
  modified_base 14: mod_base = OTHER; note = 2'-O-methyluridine-3'-phosphate
  modified_base 15: mod_base = OTHER; note = 2'-O-methyladenosine-3'-phosphate
  modified_base 16: mod_base = OTHER; note = 2'-O-methyladenosine-3'-phosphate
  modified_base 17: mod_base = OTHER; note = 2'-O-methyladenosine-3'-phosphate
  modified_base 18: mod_base = OTHER; note = 2'-O-methyluridine-3'-phosphate
  modified_base 19: mod_base = OTHER; note = 2'-O-methyluridine-3'-phosphate
  modified_base 20: mod_base = OTHER; note = 2'-O-methylguanosine-3'-phosphate
  modified_base 21: mod_base = OTHER; note = 2'-O-methylguanosine-3'-phosphate
  modified_base 22: mod_base = OTHER; note = 2'-O-methyladenosine-3'-phosphorothioate
  modified_base 23: mod_base = OTHER; note = inverted (3'-3' linked) abasic deoxyribonucleotide
  misc_feature 1: note = DNA
  misc_feature 2..22: note = RNA
  misc_feature 23: note = DNA
naggctgtaggcataaattggan

SEQ ID NO: 264 - DNA, 23 bp, synthetic construct
  source 1..23: mol_type = other DNA
  modified_base 1: mod_base = OTHER; note 4-((1,22-bis(((2R,3R,4R,5R,6R)-3-acetamido-4,5-diacetoxy-6- (acetoxymethyl)tetrahydro-2H-pyran-2-yl)oxy)-10-((2-(2-(((2 R,3R,4R,5R,6R)-3-acetamido-4,5-diacetoxy-6-(acetoxymethyl)t etrahydro-2H-pyran-2-yl)oxy)ethoxy)ethyl)carbamoyl)-7,12,16 -trioxo-3,20-dioxa-6,11,17-triazadocosan-15-yl)carbamoyl)cy clohexyl phosphorothioate-inverted (3'-3' linked) abasic deoxyribonucleotide-5'-phosphorothioate
  modified_base 2: mod_base = OTHER; note = 2'-O-methylcytidine-3'-phosphate
  modified_base 3: mod_base = OTHER; note = 2'-O-methylguanosine-3'-phosphate
  modified_base 4: mod_base = OTHER; note = 2'-O-methylguanosine-3'-phosphate
  modified_base 5: mod_base = OTHER; note = 2'-O-methylcytidine-3'-phosphate
  modified_base 6: mod_base = OTHER; note = 2'-O-methyluridine-3'-phosphate
  modified_base 7: mod_base = OTHER; note = 2'-O-methylguanosine-3'-phosphate
  modified_base 8: mod_base = OTHER; note = 2'-O-methyluridine-3'-phosphate
  modified_base 9: mod_base = OTHER; note = 2'-O-methyladenosine-3'-phosphate
  modified_base 10: mod_base = OTHER; note = 2'-fluoroguanosine-3'-phosphate
  modified_base 11: mod_base = OTHER; note = 2'-fluoroguanosine-3'-phosphate
  modified_base 12: mod_base = OTHER; note = 2'-fluorocytidine-3'-phosphate
  modified_base 13: mod_base = OTHER; note = 2'-O-methyladenosine-3'-phosphate
  modified_base 14: mod_base = OTHER; note = 2'-O-methyluridine-3'-phosphate
  modified_base 15: mod_base = OTHER; note = 2'-O-methyladenosine-3'-phosphate
  modified_base 16: mod_base = OTHER; note = 2'-O-methyladenosine-3'-phosphate
  modified_base 17: mod_base = OTHER; note = 2'-O-methyladenosine-3'-phosphate
  modified_base 18: mod_base = OTHER; note = 2'-O-methyluridine-3'-phosphate
  modified_base 19: mod_base = OTHER; note = 2'-O-methyluridine-3'-phosphate
  modified_base 20: mod_base = OTHER; note = 2'-O-methylguanosine-3'-phosphate
  modified_base 21: mod_base = OTHER; note = 2'-O-methylguanosine-3'-phosphate
  modified_base 22: mod_base = OTHER; note = 2'-O-methyluridine-3'-phosphorothioate
  modified_base 23: mod_base = OTHER; note = inverted (3'-3' linked) abasic deoxyribonucleotide
  misc_feature 1: note = DNA
  misc_feature 2..22: note = RNA
  misc_feature 23: note = DNA
ncggctgtaggcataaattggtn

SEQ ID NO: 265 - DNA, 23 bp, synthetic construct
  source 1..23: mol_type = other DNA
  modified_base 1: mod_base = OTHER; note 4-((1,22-bis(((2R,3R,4R,5R,6R)-3-acetamido-4,5-diacetoxy-6- (acetoxymethyl)tetrahydro-2H-pyran-2-yl)oxy)-10-((2-(2-(((2 R,3R,4R,5R,6R)-3-acetamido-4,5-diacetoxy-6-(acetoxymethyl)t etrahydro-2H-pyran-2-yl)oxy)ethoxy)ethyl)carbamoyl)-7,12,16 -trioxo-3,20-dioxa-6,11,17-triazadocosan-15-yl)carbamoyl)cy clohexyl phosphorothioate-inverted (3'-3' linked) abasic deoxyribonucleotide-5'-phosphorothioate
  modified_base 2: mod_base = OTHER; note = 2'-O-methylcytidine-3'-phosphate
  modified_base 3: mod_base = OTHER; note = 2'-O-methylguanosine-3'-phosphate
  modified_base 4: mod_base = OTHER; note = 2'-O-methylguanosine-3'-phosphate
  modified_base 5: mod_base = OTHER; note = 2'-O-methylcytidine-3'-phosphate
  modified_base 6: mod_base = OTHER; note = 2'-O-methyluridine-3'-phosphate
  modified_base 7: mod_base = OTHER; note = 2'-O-methylguanosine-3'-phosphate
  modified_base 8: mod_base = OTHER; note = 2'-O-methyluridine-3'-phosphate
  modified_base 9: mod_base = OTHER; note = 2'-O-methyladenosine-3'-phosphate
  modified_base 10: mod_base = OTHER; note = 2'-fluoroguanosine-3'-phosphate
  modified_base 11: mod_base = OTHER; note = 2'-fluoroguanosine-3'-phosphate
  modified_base 12: mod_base = OTHER; note = 2'-fluorocytidine-3'-phosphate
  modified_base 13: mod_base = OTHER; note = 2'-O-methyladenosine-3'-phosphate
  modified_base 14: mod_base = OTHER; note = 2'-O-methyluridine-3'-phosphate
  modified_base 15: mod_base = OTHER; note = 2'-O-methyladenosine-3'-phosphate
  modified_base 16: mod_base = OTHER; note = 2'-O-methyladenosine-3'-phosphate
  modified_base 17: mod_base = OTHER; note = 2'-O-methyladenosine-3'-phosphate
  modified_base 18: mod_base = OTHER; note = 2'-O-methyluridine-3'-phosphate
  modified_base 19: mod_base = OTHER; note = 2'-O-methyluridine-3'-phosphate
  modified_base 20: mod_base = OTHER; note = 2'-O-methylguanosine-3'-phosphate
  modified_base 21: mod_base = OTHER; note = 2'-O-methylguanosine-3'-phosphate
  modified_base 22: mod_base = OTHER; note = 2'-O-methyladenosine-3'-phosphorothioate
  modified_base 23: mod_base = OTHER; note = inverted (3'-3' linked) abasic deoxyribonucleotide
  misc_feature 1: note = DNA
  misc_feature 2..22: note = RNA
  misc_feature 23: note = DNA
ncggctgtaggcataaattggan

SEQ ID NO: 266 - DNA, 23 bp, synthetic construct
  source 1..23: mol_type = other DNA
  modified_base 1: mod_base = OTHER; note 4-((1,22-bis(((2R,3R,4R,5R,6R)-3-acetamido-4,5-diacetoxy-6- (acetoxymethyl)tetrahydro-2H-pyran-2-yl)oxy)-10-((2-(2-(((2 R,3R,4R,5R,6R)-3-acetamido-4,5-diacetoxy-6-(acetoxymethyl)t etrahydro-2H-pyran-2-yl)oxy)ethoxy)ethyl)carbamoyl)-7,12,16 -trioxo-3,20-dioxa-6,11,17-triazadocosan-15-yl)carbamoyl)cy clohexyl phosphorothioate-inverted (3'-3' linked) abasic deoxyribonucleotide-5'-phosphorothioate
  modified_base 2: mod_base = OTHER; note = 2'-O-methylcytidine-3'-phosphate
  modified_base 3: mod_base = OTHER; note = 2'-O-methylcytidine-3'-phosphate
  modified_base 4: mod_base = OTHER; note = 2'-O-methylcytidine-3'-phosphate
  modified_base 5: mod_base = OTHER; note = 2'-O-methyluridine-3'-phosphate
  modified_base 6: mod_base = OTHER; note = 2'-O-methylguanosine-3'-phosphate
  modified_base 7: mod_base = OTHER; note = 2'-O-methyluridine-3'-phosphate
  modified_base 8: mod_base = OTHER; note = 2'-O-methyladenosine-3'-phosphate
  modified_base 9: mod_base = OTHER; note = 2'-O-methylguanosine-3'-phosphate
  modified_base 10: mod_base = OTHER; note = 2'-fluoroguanosine-3'-phosphate
  modified_base 11: mod_base = OTHER; note = 2'-fluorocytidine-3'-phosphate
  modified_base 12: mod_base = OTHER; note = 2'-fluoroadenosine-3'-phosphate
  modified_base 13: mod_base = OTHER; note = 2'-O-methyluridine-3'-phosphate
  modified_base 14: mod_base = OTHER; note = 2'-O-methyladenosine-3'-phosphate
  modified_base 15: mod_base = OTHER; note = 2'-O-methyladenosine-3'-phosphate
  modified_base 16: mod_base = OTHER; note = 2'-O-methyladenosine-3'-phosphate
  modified_base 17: mod_base = OTHER; note = 2'-O-methyluridine-3'-phosphate
  modified_base 18: mod_base = OTHER; note = 2'-O-methyluridine-3'-phosphate
  modified_base 19: mod_base = OTHER; note = 2'-O-methylguanosine-3'-phosphate
  modified_base 20: mod_base = OTHER; note = 2'-O-methylguanosine-3'-phosphate
  modified_base 21: mod_base = OTHER; note = 2'-O-methyluridine-3'-phosphate
  modified_base 22: mod_base = OTHER; note = 2'-O-methyladenosine-3'-phosphorothioate
  modified_base 23: mod_base = OTHER; note = inverted (3'-3' linked) abasic deoxyribonucleotide
  misc_feature 1: note = DNA
  misc_feature 2..22: note = RNA
  misc_feature 23: note = DNA
nccctgtaggcataaattggtan

SEQ ID NO: 267 - DNA, 22 bp, synthetic construct
  source 1..22: mol_type = other DNA
  modified_base 1: mod_base = OTHER; note 4-((1,22-bis(((2R,3R,4R,5R,6R)-3-acetamido-4,5-diacetoxy-6- (acetoxymethyl)tetrahydro-2H-pyran-2-yl)oxy)-10-((2-(2-(((2 R,3R,4R,5R,6R)-3-acetamido-4,5-diacetoxy-6-(acetoxymethyl)t etrahydro-2H-pyran-2-yl)oxy)ethoxy)ethyl)carbamoyl)-7,12,16 -trioxo-3,20-dioxa-6,11,17-triazadocosan-15-yl)carbamoyl)cy clohexyl phosphate-2'-O-methylcytidine-3'-phosphorothioate
  modified_base 2: mod_base = OTHER; note = 2'-O-methylcytidine-3'-phosphate
  modified_base 3: mod_base = OTHER; note = 2'-O-methylcytidine-3'-phosphate
  modified_base 4: mod_base = OTHER; note = 2'-O-methyluridine-3'-phosphate
  modified_base 5: mod_base = OTHER; note = 2'-O-methylguanosine-3'-phosphate
  modified_base 6: mod_base = OTHER; note = 2'-O-methyluridine-3'-phosphate
  modified_base 7: mod_base = OTHER; note = 2'-O-methyladenosine-3'-phosphate
  modified_base 8: mod_base = OTHER; note = 2'-O-methylguanosine-3'-phosphate
  modified_base 9: mod_base = OTHER; note = 2'-fluoroguanosine-3'-phosphate
  modified_base 10: mod_base = OTHER; note = 2'-fluorocytidine-3'-phosphate
  modified_base 11: mod_base = OTHER; note = 2'-fluoroadenosine-3'-phosphate
  modified_base 12: mod_base = OTHER; note = 2'-O-methyluridine-3'-phosphate
  modified_base 13: mod_base = OTHER; note = 2'-O-methyladenosine-3'-phosphate
  modified_base 14: mod_base = OTHER; note = 2'-O-methyladenosine-3'-phosphate
  modified_base 15: mod_base = OTHER; note = 2'-O-methyladenosine-3'-phosphate
  modified_base 16: mod_base = OTHER; note = 2'-O-methyluridine-3'-phosphate
  modified_base 17: mod_base = OTHER; note = 2'-O-methyluridine-3'-phosphate
  modified_base 18: mod_base = OTHER; note = 2'-O-methylguanosine-3'-phosphate
  modified_base 19: mod_base = OTHER; note = 2'-O-methylguanosine-3'-phosphate
  modified_base 20: mod_base = OTHER; note = 2'-O-methyluridine-3'-phosphate
  modified_base 21: mod_base = OTHER; note = 2'-O-methyladenosine-3'-phosphorothioate
  modified_base 22: mod_base = OTHER; note = inverted (3'-3' linked) abasic deoxyribonucleotide
  misc_feature 1..21: note = RNA
  misc_feature 22: note = DNA
ccctgtaggcataaattggtan

SEQ ID NO: 268 - RNA, 25 nt, synthetic construct
  source 1..25: mol_type = other RNA
  modified_base 25: mod_base = OTHER; note = thymine
ttgcctgtaggcataaattggtatt

SEQ ID NO: 269 - RNA, 26 nt, synthetic construct
  source 1..26: mol_type = other RNA
tatatgcctgtaggcataaattggta

SEQ ID NO: 270 - RNA, 26 nt, synthetic construct
  source 1..26: mol_type = other RNA
  modified_base 25: mod_base = OTHER; note = thymine
gcggaggctgtaggcataaattggta

SEQ ID NO: 271 - RNA, 21 nt, synthetic construct
  source 1..21: mol_type = other RNA
ctgtaggcataaattggtatt

SEQ ID NO: 272 - RNA, 21 nt, synthetic construct
  source 1..21: mol_type = other RNA
gcctgtaggcataaattggta

SEQ ID NO: 273 - RNA, 21 nt, synthetic construct
  source 1..21: mol_type = other RNA
  modified_base 20: mod_base = OTHER; note = thymine
gcctgtaggcataaattggta

SEQ ID NO: 274 - RNA, 21 nt, synthetic construct
  source 1..21: mol_type = other RNA
aactgtaggcataaattggta

SEQ ID NO: 275 - RNA, 21 nt, synthetic construct
  source 1..21: mol_type = other RNA
tcgtggtggacttctctcaat

SEQ ID NO: 276 - RNA, 21 nt, synthetic construct
  source 1..21: mol_type = other RNA
aagtggtggacttctctcaat

SEQ ID NO: 277 - RNA, 21 nt, synthetic construct
  source 1..21: mol_type = other RNA
  modified_base 21: mod_base = OTHER; note = thymine
tcgtggtggacttctctcaat

SEQ ID NO: 278 - RNA, 21 nt, synthetic construct
  source 1..21: mol_type = other RNA
cgtggtggacttctctcaatt

SEQ ID NO: 279 - RNA, 21 nt, synthetic construct
  source 1..21: mol_type = other RNA
aatggtggacttctctcaatt

SEQ ID NO: 280 - RNA, 21 nt, synthetic construct
  source 1..21: mol_type = other RNA
  modified_base 20: mod_base = OTHER; note = thymine
  modified_base 21: mod_base = OTHER; note = thymine
cgtggtggacttctctcaatt

SEQ ID NO: 281 - RNA, 21 nt, synthetic construct
  source 1..21: mol_type = other RNA
ggacttctctcaattttctaa

SEQ ID NO: 282 - RNA, 21 nt, synthetic construct
  source 1..21: mol_type = other RNA
cgtggtggacttctctcaata

SEQ ID NO: 283 - RNA, 21 nt, synthetic construct
  source 1..21: mol_type = other RNA
tcgtggtggacttctctcaaa

SEQ ID NO: 284 - RNA, 21 nt, synthetic construct
  source 1..21: mol_type = other RNA
acctgtaggcataaattggta

SEQ ID NO: 285 - RNA, 19 nt, synthetic construct
  source 1..19: mol_type = other RNA
ctgtaggcataaattggta

SEQ ID NO: 286 - RNA, 20 nt, synthetic construct
  source 1..20: mol_type = other RNA
actgtaggcataaattggta

SEQ ID NO: 287 - RNA, 21 nt, synthetic construct
  source 1..21: mol_type = other RNA
ggctgtaggcataaattggta

SEQ ID NO: 288 - RNA, 21 nt, synthetic construct
  source 1..21: mol_type = other RNA
aagtggtggacttctctcaaa

SEQ ID NO: 289 - RNA, 21 nt, synthetic construct
  source 1..21: mol_type = other RNA
ccgtggtggacttctctcaat

SEQ ID NO: 290 - RNA, 22 nt, synthetic construct
  source 1..22: mol_type = other RNA
ctcgtggtggacttctctcaat

SEQ ID NO: 291 - RNA, 19 nt, synthetic construct
  source 1..19: mol_type = other RNA
gtggtggacttctctcaat

SEQ ID NO: 292 - RNA, 21 nt, synthetic construct
  source 1..21: mol_type = other RNA
gtggtggacttctctcaattt

SEQ ID NO: 293 - RNA, 22 nt, synthetic construct
  source 1..22: mol_type = other RNA
tcgtggtggacttctctcaatt

SEQ ID NO: 294 - RNA, 19 nt, synthetic construct
  source 1..19: mol_type = other RNA
tggtggacttctctcaatt

SEQ ID NO: 295 - RNA, 22 nt, synthetic construct
  source 1..22: mol_type = other RNA
gctgtaggcataaattggtatt

SEQ ID NO: 296 - RNA, 23 nt, synthetic construct
  source 1..23: mol_type = other RNA
ggctgtaggcataaattggtatt

SEQ ID NO: 297 - RNA, 23 nt, synthetic construct
  source 1..23: mol_type = other RNA
aactgtaggcataaattggtatt

SEQ ID NO: 298 - RNA, 21 nt, synthetic construct
  source 1..21: mol_type = other RNA
tggtggacttctctcaatatt

SEQ ID NO: 299 - RNA, 22 nt, synthetic construct
  source 1..22: mol_type = other RNA
gtggtggacttctctcaatatt

SEQ ID NO: 300 - RNA, 23 nt, synthetic construct
  source 1..23: mol_type = other RNA
aatggtggacttctctcaatatt

SEQ ID NO: 301 - RNA, 23 nt, synthetic construct
  source 1..23: mol_type = other RNA
cgtggtggacttctctcaatatt

SEQ ID NO: 302 - RNA, 21 nt, synthetic construct
  source 1..21: mol_type = other RNA
gtggtggacttctctcaaatt

SEQ ID NO: 303 - RNA, 22 nt, synthetic construct
  source 1..22: mol_type = other RNA
cgtggtggacttctctcaaatt

SEQ ID NO: 304 - RNA, 23 nt, synthetic construct
  source 1..23: mol_type = other RNA
aagtggtggacttctctcaaatt

SEQ ID NO: 305 - RNA, 23 nt, synthetic construct
  source 1..23: mol_type = other RNA
tcgtggtggacttctctcaaatt

SEQ ID NO: 306 - RNA, 23 nt, synthetic construct
  source 1..23: mol_type = other RNA
ctcgtggtggacttctctcaata

SEQ ID NO: 307 - RNA, 25 nt, synthetic construct
  source 1..25: mol_type = other RNA
ctcgtggtggacttctctcaatatt

SEQ ID NO: 308 - RNA, 23 nt, synthetic construct
  source 1..23: mol_type = other RNA
gaggctgtaggcataaattggta

SEQ ID NO: 309 - RNA, 25 nt, synthetic construct
  source 1..25: mol_type = other RNA
gaggctgtaggcataaattggtatt

SEQ ID NO: 310 - RNA, 19 nt, synthetic construct
  source 1..19: mol_type = other RNA
ggacttctctcaattttct

SEQ ID NO: 311 - RNA, 19 nt, synthetic construct
  source 1..19: mol_type = other RNA
ggacttctctcaattttca

SEQ ID NO: 312 - RNA, 21 nt, synthetic construct
  source 1..21: mol_type = other RNA
gtggacttctctcaattttca

SEQ ID NO: 313 - RNA, 19 nt, synthetic construct
  source 1..19: mol_type = other RNA
gctgtaggcataaattggt

SEQ ID NO: 314 - RNA, 20 nt, synthetic construct
  source 1..20: mol_type = other RNA
ggctgtaggcataaattggt

SEQ ID NO: 315 - RNA, 22 nt, synthetic construct
  source 1..22: mol_type = other RNA
gaggctgtaggcataaattggt

SEQ ID NO: 316 - RNA, 19 nt, synthetic construct
  source 1..19: mol_type = other RNA
gctgtaggcataaattgga

SEQ ID NO: 317 - RNA, 20 nt, synthetic construct
  source 1..20: mol_type = other RNA
ggctgtaggcataaattgga

SEQ ID NO: 318 - RNA, 21 nt, synthetic construct
  source 1..21: mol_type = other RNA
agctgtaggcataaattggta

SEQ ID NO: 319 - RNA, 21 nt, synthetic construct
  source 1..21: mol_type = other RNA
ggctgtaggcataaattggtt

SEQ ID NO: 320 - RNA, 21 nt, synthetic construct
  source 1..21: mol_type = other RNA
aggctgtaggcataaattggt

SEQ ID NO: 321 - RNA, 21 nt, synthetic construct
  source 1..21: mol_type = other RNA
aggctgtaggcataaattgga

SEQ ID NO: 322 - RNA, 21 nt, synthetic construct
  source 1..21: mol_type = other RNA
cggctgtaggcataaattggt

SEQ ID NO: 323 - RNA, 21 nt, synthetic construct
  source 1..21: mol_type = other RNA
cggctgtaggcataaattgga

SEQ ID NO: 324 - RNA, 21 nt, synthetic construct
  source 1..21: mol_type = other RNA
ccctgtaggcataaattggta

SEQ ID NO: 325 - RNA, 21 nt, synthetic construct
  source 1..21: mol_type = other RNA
tgaaaattgagagaagtcctt
